United States Patent Application Publication US 2023/0392137 A1 - sequence listing, part 2

SEQ ID NO: 437 - RNA, 30 nt, synthetic construct; identical to SEQ ID NO: 134
  misc_feature 1..30: note = Synthetic: WV-47348
  misc_feature 1..30: note = Synthetic: ADR-0104205
  modified_base 1: mod_base = cm
  modified_base 1..2: mod_base = OTHER; note R-N-(1,3-dimethylimidazolidin-2-ylidene)phosphoramidate
  modified_base 2: mod_base = cm
  modified_base 2..3: mod_base = OTHER; note = S-phosphorothioate
  modified_base 3: mod_base = cm
  modified_base 3..4: mod_base = OTHER; note = S-phosphorothioate
  modified_base 4: mod_base = OTHER; note = 2-fluororibose adenine
  modified_base 4..5: mod_base = OTHER; note = S-phosphorothioate
  modified_base 5: mod_base = OTHER; note = 2-fluororibose guanine
  modified_base 5..6: mod_base = OTHER; note = S-phosphorothioate
  modified_base 6: mod_base = cm
  modified_base 7: mod_base = OTHER; note = 2-O-methylribose adenine
  modified_base 7..8: mod_base = OTHER; note = S-phosphorothioate
  modified_base 8: mod_base = OTHER; note = 2-fluororibose guanine
  modified_base 8..9: mod_base = OTHER; note = S-phosphorothioate
  modified_base 9: mod_base = OTHER; note = 2-fluororibose cytosine
  modified_base 10: mod_base = um
  modified_base 10..11: mod_base = OTHER; note = S-phosphorothioate
  modified_base 11: mod_base = OTHER; note = 2-fluororibose uracil
  modified_base 11..12: mod_base = OTHER; note R-N-(1,3-dimethylimidazolidin-2-ylidene)phosphoramidate
  modified_base 12: mod_base = cm
  modified_base 13: mod_base = OTHER; note = 2-fluororibose adenine
  modified_base 13..14: mod_base = OTHER; note = S-phosphorothioate
  modified_base 14: mod_base = OTHER; note = 2-fluororibose guanine
  modified_base 14..15: mod_base = OTHER; note R-N-(1,3-dimethylimidazolidin-2-ylidene)phosphoramidate
  modified_base 15: mod_base = OTHER; note = 2-fluororibose uracil
  modified_base 16: mod_base = cm
  modified_base 16..17: mod_base = OTHER; note = S-phosphorothioate
  modified_base 17: mod_base = OTHER; note = 2-fluororibose cytosine
  modified_base 17..18: mod_base = OTHER; note = S-phosphorothioate
  modified_base 18: mod_base = OTHER; note = 2-fluororibose cytosine
  modified_base 18..19: mod_base = OTHER; note = S-phosphorothioate
  modified_base 19: mod_base = OTHER; note = 2-fluororibose uracil
  modified_base 19..20: mod_base = OTHER; note = S-phosphorothioate
  modified_base 20: mod_base = um
  modified_base 21: mod_base = um
  modified_base 22: mod_base = OTHER; note = 2-fluororibose cytosine
  modified_base 22..23: mod_base = OTHER; note = S-phosphorothioate
  modified_base 23: mod_base = OTHER; note = deoxyribose thymine
  modified_base 23..24: mod_base = OTHER; note = S-phosphorothioate
  modified_base 24: mod_base = OTHER; note = deoxyribose 6-deamino-oxo-adenine
  modified_base 24..25: mod_base = OTHER; note = S-phosphorothioate
  modified_base 25: mod_base = OTHER; note = deoxyribose inosine
  modified_base 25..26: mod_base = OTHER; note S-N-(1,3-dimethylimidazolidin-2-ylidene)phosphoramidate
  modified_base 26: mod_base = um
  modified_base 27: mod_base = OTHER; note = 2-fluororibose cytosine
  modified_base 27..28: mod_base = OTHER; note = S-phosphorothioate
  modified_base 28: mod_base = gm
  modified_base 28..29: mod_base = OTHER; note = S-phosphorothioate
  modified_base 29: mod_base = OTHER; note = 2-O-methylribose adenine
  modified_base 29..30: mod_base = OTHER; note R-N-(1,3-dimethylimidazolidin-2-ylidene)phosphoramidate
  modified_base 30: mod_base = um
  source 1..30: mol_type = other RNA

SEQ ID NO: 438 - RNA, 30 nt, synthetic construct; identical to SEQ ID NO: 134
  misc_feature 1..30: note = Synthetic: WV-47349
  misc_feature 1..30: note = Synthetic: ADR-0104210
  modified_base 1: mod_base = cm
  modified_base 1..2: mod_base = OTHER; note R-N-(1,3-dimethylimidazolidin-2-ylidene)phosphoramidate
  modified_base 2: mod_base = cm
  modified_base 2..3: mod_base = OTHER; note = S-phosphorothioate
  modified_base 3: mod_base = cm
  modified_base 3..4: mod_base = OTHER; note = S-phosphorothioate
  modified_base 4: mod_base = OTHER; note = 2-fluororibose adenine
  modified_base 4..5: mod_base = OTHER; note = S-phosphorothioate
  modified_base 5: mod_base = OTHER; note = 2-fluororibose guanine
  modified_base 5..6: mod_base = OTHER; note = S-phosphorothioate
  modified_base 6: mod_base = cm
  modified_base 7: mod_base = OTHER; note = 2-O-methylribose adenine
  modified_base 7..8: mod_base = OTHER; note = S-phosphorothioate
  modified_base 8: mod_base = OTHER; note = 2-fluororibose guanine
  modified_base 8..9: mod_base = OTHER; note = S-phosphorothioate
  modified_base 9: mod_base = OTHER; note = 2-fluororibose cytosine
  modified_base 10: mod_base = um
  modified_base 10..11: mod_base = OTHER; note = S-phosphorothioate
  modified_base 11: mod_base = OTHER; note = 2-fluororibose uracil
  modified_base 11..12: mod_base = OTHER; note R-N-(1,3-dimethylimidazolidin-2-ylidene)phosphoramidate
  modified_base 12: mod_base = cm
  modified_base 13: mod_base = OTHER; note = 2-fluororibose adenine
  modified_base 13..14: mod_base = OTHER; note = S-phosphorothioate
  modified_base 14: mod_base = OTHER; note = 2-fluororibose guanine
  modified_base 14..15: mod_base = OTHER; note R-N-(1,3-dimethylimidazolidin-2-ylidene)phosphoramidate
  modified_base 15: mod_base = OTHER; note = 2-fluororibose uracil
  modified_base 16: mod_base = cm
  modified_base 16..17: mod_base = OTHER; note = S-phosphorothioate
  modified_base 17: mod_base = OTHER; note = 2-fluororibose cytosine
  modified_base 17..18: mod_base = OTHER; note = S-phosphorothioate
  modified_base 18: mod_base = OTHER; note = 2-fluororibose cytosine
  modified_base 18..19: mod_base = OTHER; note = S-phosphorothioate
  modified_base 19: mod_base = OTHER; note = 2-fluororibose uracil
  modified_base 19..20: mod_base = OTHER; note = S-phosphorothioate
  modified_base 20: mod_base = um
  modified_base 21: mod_base = um
  modified_base 22: mod_base = OTHER; note = 2-fluororibose cytosine
  modified_base 22..23: mod_base = OTHER; note = S-phosphorothioate
  modified_base 23: mod_base = OTHER; note = deoxyribose thymine
  modified_base 23..24: mod_base = OTHER; note = S-phosphorothioate
  modified_base 24: mod_base = OTHER; note = deoxyribose 2-hydroxybenzimidazole
  modified_base 24..25: mod_base = OTHER; note = S-phosphorothioate
  modified_base 25: mod_base = OTHER; note = deoxyribose inosine
  modified_base 25..26: mod_base = OTHER; note S-N-(1,3-dimethylimidazolidin-2-ylidene)phosphoramidate
  modified_base 26: mod_base = um
  modified_base 27: mod_base = OTHER; note = 2-fluororibose cytosine
  modified_base 27..28: mod_base = OTHER; note = S-phosphorothioate
  modified_base 28: mod_base = gm
  modified_base 28..29: mod_base = OTHER; note = S-phosphorothioate
  modified_base 29: mod_base = OTHER; note = 2-O-methylribose adenine
  modified_base 29..30: mod_base = OTHER; note R-N-(1,3-dimethylimidazolidin-2-ylidene)phosphoramidate
  modified_base 30: mod_base = um
  source 1..30: mol_type = other RNA

SEQ ID NO: 439 - RNA, 30 nt, synthetic construct
  misc_feature 1..30: note = Synthetic: WV-47350
  misc_feature 1..30: note = Synthetic: ADR-0104212
  modified_base 1: mod_base = cm
  modified_base 1..2: mod_base = OTHER; note R-N-(1,3-dimethylimidazolidin-2-ylidene)phosphoramidate
  modified_base 2: mod_base = cm
  modified_base 2..3: mod_base = OTHER; note = S-phosphorothioate
  modified_base 3: mod_base = cm
  modified_base 3..4: mod_base = OTHER; note = S-phosphorothioate
  modified_base 4: mod_base = OTHER; note = 2-fluororibose adenine
  modified_base 4..5: mod_base = OTHER; note = S-phosphorothioate
  modified_base 5: mod_base = OTHER; note = 2-fluororibose guanine
  modified_base 5..6: mod_base = OTHER; note = S-phosphorothioate
  modified_base 6: mod_base = cm
  modified_base 7: mod_base = OTHER; note = 2-O-methylribose adenine
  modified_base 7..8: mod_base = OTHER; note = S-phosphorothioate
  modified_base 8: mod_base = OTHER; note = 2-fluororibose guanine
  modified_base 8..9: mod_base = OTHER; note = S-phosphorothioate
  modified_base 9: mod_base = OTHER; note = 2-fluororibose cytosine
  modified_base 10: mod_base = um
  modified_base 10..11: mod_base = OTHER; note = S-phosphorothioate
  modified_base 11: mod_base = OTHER; note = 2-fluororibose uracil
  modified_base 11..12: mod_base = OTHER; note R-N-(1,3-dimethylimidazolidin-2-ylidene)phosphoramidate
  modified_base 12: mod_base = cm
  modified_base 13: mod_base = OTHER; note = 2-fluororibose adenine
  modified_base 13..14: mod_base = OTHER; note = S-phosphorothioate
  modified_base 14: mod_base = OTHER; note = 2-fluororibose guanine
  modified_base 14..15: mod_base = OTHER; note R-N-(1,3-dimethylimidazolidin-2-ylidene)phosphoramidate
  modified_base 15: mod_base = OTHER; note = 2-fluororibose uracil
  modified_base 16: mod_base = cm
  modified_base 16..17: mod_base = OTHER; note = S-phosphorothioate
  modified_base 17: mod_base = OTHER; note = 2-fluororibose cytosine
  modified_base 17..18: mod_base = OTHER; note = S-phosphorothioate
  modified_base 18: mod_base = OTHER; note = 2-fluororibose cytosine
  modified_base 18..19: mod_base = OTHER; note = S-phosphorothioate
  modified_base 19: mod_base = OTHER; note = 2-fluororibose uracil
  modified_base 19..20: mod_base = OTHER; note = S-phosphorothioate
  modified_base 20: mod_base = um
  modified_base 21: mod_base = um
  modified_base 22: mod_base = OTHER; note = 2-fluororibose cytosine
  modified_base 22..23: mod_base = OTHER; note = S-phosphorothioate
  modified_base 23: mod_base = OTHER; note = deoxyribose thymine
  modified_base 23..24: mod_base = OTHER; note = S-phosphorothioate
  modified_base 24: mod_base = OTHER; note = deoxyribose 6,8-Dihydroxypurine
  modified_base 24..25: mod_base = OTHER; note = S-phosphorothioate
  modified_base 25: mod_base = OTHER; note = deoxyribose inosine
  modified_base 25..26: mod_base = OTHER; note S-N-(1,3-dimethylimidazolidin-2-ylidene)phosphoramidate
  modified_base 26: mod_base = um
  modified_base 27: mod_base = OTHER; note = 2-fluororibose cytosine
  modified_base 27..28: mod_base = OTHER; note = S-phosphorothioate
  modified_base 28: mod_base = gm
  modified_base 28..29: mod_base = OTHER; note = S-phosphorothioate
  modified_base 29: mod_base = OTHER; note = 2-O-methylribose adenine
  modified_base 29..30: mod_base = OTHER; note R-N-(1,3-dimethylimidazolidin-2-ylidene)phosphoramidate
  modified_base 30: mod_base = um
  source 1..30: mol_type = other RNA
cccagcagcttcagtccctttctggtcgat

SEQ ID NO: 440 - RNA, 30 nt, synthetic construct; identical to SEQ ID NO: 439
  misc_feature 1..30: note = Synthetic: WV-47351
  misc_feature 1..30: note = Synthetic: ADR-0104214
  modified_base 1: mod_base = cm
  modified_base 1..2: mod_base = OTHER; note R-N-(1,3-dimethylimidazolidin-2-ylidene)phosphoramidate
  modified_base 2: mod_base = cm
  modified_base 2..3: mod_base = OTHER; note = S-phosphorothioate
  modified_base 3: mod_base = cm
  modified_base 3..4: mod_base = OTHER; note = S-phosphorothioate
  modified_base 4: mod_base = OTHER; note = 2-fluororibose adenine
  modified_base 4..5: mod_base = OTHER; note = S-phosphorothioate
  modified_base 5: mod_base = OTHER; note = 2-fluororibose guanine
  modified_base 5..6: mod_base = OTHER; note = S-phosphorothioate
  modified_base 6: mod_base = cm
  modified_base 7: mod_base = OTHER; note = 2-O-methylribose adenine
  modified_base 7..8: mod_base = OTHER; note = S-phosphorothioate
  modified_base 8: mod_base = OTHER; note = 2-fluororibose guanine
  modified_base 8..9: mod_base = OTHER; note = S-phosphorothioate
  modified_base 9: mod_base = OTHER; note = 2-fluororibose cytosine
  modified_base 10: mod_base = um
  modified_base 10..11: mod_base = OTHER; note = S-phosphorothioate
  modified_base 11: mod_base = OTHER; note = 2-fluororibose uracil
  modified_base 11..12: mod_base = OTHER; note R-N-(1,3-dimethylimidazolidin-2-ylidene)phosphoramidate
  modified_base 12: mod_base = cm
  modified_base 13: mod_base = OTHER; note = 2-fluororibose adenine
  modified_base 13..14: mod_base = OTHER; note = S-phosphorothioate
  modified_base 14: mod_base = OTHER; note = 2-fluororibose guanine
  modified_base 14..15: mod_base = OTHER; note R-N-(1,3-dimethylimidazolidin-2-ylidene)phosphoramidate
  modified_base 15: mod_base = OTHER; note = 2-fluororibose uracil
  modified_base 16: mod_base = cm
  modified_base 16..17: mod_base = OTHER; note = S-phosphorothioate
  modified_base 17: mod_base = OTHER; note = 2-fluororibose cytosine
  modified_base 17..18: mod_base = OTHER; note = S-phosphorothioate
  modified_base 18: mod_base = OTHER; note = 2-fluororibose cytosine
  modified_base 18..19: mod_base = OTHER; note = S-phosphorothioate
  modified_base 19: mod_base = OTHER; note = 2-fluororibose uracil
  modified_base 19..20: mod_base = OTHER; note = S-phosphorothioate
  modified_base 20: mod_base = um
  modified_base 21: mod_base = um
  modified_base 22: mod_base = OTHER; note = 2-fluororibose cytosine
  modified_base 22..23: mod_base = OTHER; note = S-phosphorothioate
  modified_base 23: mod_base = OTHER; note = deoxyribose thymine
  modified_base 23..24: mod_base = OTHER; note = S-phosphorothioate
  modified_base 24: mod_base = OTHER; note = deoxyribose 8-hydroxyguanine
  modified_base 24..25: mod_base = OTHER; note = S-phosphorothioate
  modified_base 25: mod_base = OTHER; note = deoxyribose inosine
  modified_base 25..26: mod_base = OTHER; note S-N-(1,3-dimethylimidazolidin-2-ylidene)phosphoramidate
  modified_base 26: mod_base = um
  modified_base 27: mod_base = OTHER; note = 2-fluororibose cytosine
  modified_base 27..28: mod_base = OTHER; note = S-phosphorothioate
  modified_base 28: mod_base = gm
  modified_base 28..29: mod_base = OTHER; note = S-phosphorothioate
  modified_base 29: mod_base = OTHER; note = 2-O-methylribose adenine
  modified_base 29..30: mod_base = OTHER; note R-N-(1,3-dimethylimidazolidin-2-ylidene)phosphoramidate
  modified_base 30: mod_base = um
  source 1..30: mol_type = other RNA

SEQ ID NO: 441 - RNA, 30 nt, synthetic construct; identical to SEQ ID NO: 273
  misc_feature 1..30: note = Synthetic: WV-47352
  misc_feature 1..30: note = Synthetic: ADR-0104207
  modified_base 1: mod_base = cm
  modified_base 1..2: mod_base = OTHER; note R-N-(1,3-dimethylimidazolidin-2-ylidene)phosphoramidate
  modified_base 2: mod_base = cm
  modified_base 2..3: mod_base = OTHER; note = S-phosphorothioate
  modified_base 3: mod_base = cm
  modified_base 3..4: mod_base = OTHER; note = S-phosphorothioate
  modified_base 4: mod_base = OTHER; note = 2-fluororibose adenine
  modified_base 4..5: mod_base = OTHER; note = S-phosphorothioate
  modified_base 5: mod_base = OTHER; note = 2-fluororibose guanine
  modified_base 5..6: mod_base = OTHER; note = S-phosphorothioate
  modified_base 6: mod_base = cm
  modified_base 7: mod_base = OTHER; note = 2-O-methylribose adenine
  modified_base 7..8: mod_base = OTHER; note = S-phosphorothioate
  modified_base 8: mod_base = OTHER; note = 2-fluororibose guanine
  modified_base 8..9: mod_base = OTHER; note = S-phosphorothioate
  modified_base 9: mod_base = OTHER; note = 2-fluororibose cytosine
  modified_base 10: mod_base = um
  modified_base 10..11: mod_base = OTHER; note = S-phosphorothioate
  modified_base 11: mod_base = OTHER; note = 2-fluororibose uracil
  modified_base 11..12: mod_base = OTHER; note R-N-(1,3-dimethylimidazolidin-2-ylidene)phosphoramidate
  modified_base 12: mod_base = cm
  modified_base 13: mod_base = OTHER; note = 2-fluororibose adenine
  modified_base 13..14: mod_base = OTHER; note = S-phosphorothioate
  modified_base 14: mod_base = OTHER; note = 2-fluororibose guanine
  modified_base 14..15: mod_base = OTHER; note R-N-(1,3-dimethylimidazolidin-2-ylidene)phosphoramidate
  modified_base 15: mod_base = OTHER; note = 2-fluororibose uracil
  modified_base 16: mod_base = cm
  modified_base 16..17: mod_base = OTHER; note = S-phosphorothioate
  modified_base 17: mod_base = OTHER; note = 2-fluororibose cytosine
  modified_base 17..18: mod_base = OTHER; note = S-phosphorothioate
  modified_base 18: mod_base = OTHER; note = 2-fluororibose cytosine
  modified_base 18..19: mod_base = OTHER; note = S-phosphorothioate
  modified_base 19: mod_base = OTHER; note = 2-fluororibose uracil
  modified_base 19..20: mod_base = OTHER; note = S-phosphorothioate
  modified_base 20: mod_base = um
  modified_base 21: mod_base = um
  modified_base 22: mod_base = OTHER; note = 2-fluororibose cytosine
  modified_base 22..23: mod_base = OTHER; note = S-phosphorothioate
  modified_base 23: mod_base = OTHER; note = deoxyribose thymine
  modified_base 23..24: mod_base = OTHER; note = S-phosphorothioate
  modified_base 24: mod_base = OTHER; note = deoxyribose 2-imidazolinone
  modified_base 24..25: mod_base = OTHER; note = S-phosphorothioate
  modified_base 25: mod_base = OTHER; note = deoxyribose inosine
  modified_base 25..26: mod_base = OTHER; note S-N-(1,3-dimethylimidazolidin-2-ylidene)phosphoramidate
  modified_base 26: mod_base = um
  modified_base 27: mod_base = OTHER; note = 2-fluororibose cytosine
  modified_base 27..28: mod_base = OTHER; note = S-phosphorothioate
  modified_base 28: mod_base = gm
  modified_base 28..29: mod_base = OTHER; note = S-phosphorothioate
  modified_base 29: mod_base = OTHER; note = 2-O-methylribose adenine
  modified_base 29..30: mod_base = OTHER; note R-N-(1,3-dimethylimidazolidin-2-ylidene)phosphoramidate
  modified_base 30: mod_base = um
  source 1..30: mol_type = other RNA

SEQ ID NO: 442 - RNA, 30 nt, synthetic construct; identical to SEQ ID NO: 306
  misc_feature 1..30: note = Synthetic: WV-47353
  misc_feature 1..30: note = Synthetic: ADR-0104234
  modified_base 1: mod_base = cm
  modified_base 1..2: mod_base = OTHER; note R-N-(1,3-dimethylimidazolidin-2-ylidene)phosphoramidate
  modified_base 2: mod_base = cm
  modified_base 2..3: mod_base = OTHER; note = S-phosphorothioate
  modified_base 3: mod_base = cm
  modified_base 3..4: mod_base = OTHER; note = S-phosphorothioate
  modified_base 4: mod_base = OTHER; note = 2-fluororibose adenine
  modified_base 4..5: mod_base = OTHER; note = S-phosphorothioate
  modified_base 5: mod_base = OTHER; note = 2-fluororibose guanine
  modified_base 5..6: mod_base = OTHER; note = S-phosphorothioate
  modified_base 6: mod_base = cm
  modified_base 7: mod_base = OTHER; note = 2-O-methylribose adenine
  modified_base 7..8: mod_base = OTHER; note = S-phosphorothioate
  modified_base 8: mod_base = OTHER; note = 2-fluororibose guanine
  modified_base 8..9: mod_base = OTHER; note = S-phosphorothioate
  modified_base 9: mod_base = OTHER; note = 2-fluororibose cytosine
  modified_base 10: mod_base = um
  modified_base 10..11: mod_base = OTHER; note = S-phosphorothioate
  modified_base 11: mod_base = OTHER; note = 2-fluororibose uracil
  modified_base 11..12: mod_base = OTHER; note R-N-(1,3-dimethylimidazolidin-2-ylidene)phosphoramidate
  modified_base 12: mod_base = cm
  modified_base 13: mod_base = OTHER; note = 2-fluororibose adenine
  modified_base 13..14: mod_base = OTHER; note = S-phosphorothioate
  modified_base 14: mod_base = OTHER; note = 2-fluororibose guanine
  modified_base 14..15: mod_base = OTHER; note R-N-(1,3-dimethylimidazolidin-2-ylidene)phosphoramidate
  modified_base 15: mod_base = OTHER; note = 2-fluororibose uracil
  modified_base 16: mod_base = cm
  modified_base 16..17: mod_base = OTHER; note = S-phosphorothioate
  modified_base 17: mod_base = OTHER; note = 2-fluororibose cytosine
  modified_base 17..18: mod_base = OTHER; note = S-phosphorothioate
  modified_base 18: mod_base = OTHER; note = 2-fluororibose cytosine
  modified_base 18..19: mod_base = OTHER; note = S-phosphorothioate
  modified_base 19: mod_base = OTHER; note = 2-fluororibose uracil
  modified_base 19..20: mod_base = OTHER; note = S-phosphorothioate
  modified_base 20: mod_base = um
  modified_base 21: mod_base = um
  modified_base 22: mod_base = OTHER; note = 2-fluororibose cytosine
  modified_base 22..23: mod_base = OTHER; note = S-phosphorothioate
  modified_base 23: mod_base = OTHER; note = deoxyribose 6-amino-9-substituted 8,9-dihydro-7H-purin-8-one
  modified_base 23..24: mod_base = OTHER; note = S-phosphorothioate
  modified_base 24: mod_base = OTHER; note = deoxyribose uracil (position 3 connectivity)
  modified_base 24..25: mod_base = OTHER; note = S-phosphorothioate
  modified_base 25: mod_base = OTHER; note = deoxyribose inosine
  modified_base 25..26: mod_base = OTHER; note S-N-(1,3-dimethylimidazolidin-2-ylidene)phosphoramidate
  modified_base 26: mod_base = um
  modified_base 27: mod_base = OTHER; note = 2-fluororibose cytosine
  modified_base 27..28: mod_base = OTHER; note = S-phosphorothioate
  modified_base 28: mod_base = gm
  modified_base 28..29: mod_base = OTHER; note = S-phosphorothioate
  modified_base 29: mod_base = OTHER; note = 2-O-methylribose adenine
  modified_base 29..30: mod_base = OTHER; note R-N-(1,3-dimethylimidazolidin-2-ylidene)phosphoramidate
  modified_base 30: mod_base = um
  source 1..30: mol_type = other RNA

SEQ ID NO: 443 - RNA, 30 nt, synthetic construct; identical to SEQ ID NO: 306
  misc_feature 1..30: note = Synthetic: WV-47354
  misc_feature 1..30: note = Synthetic: ADR-0104222
  modified_base 1: mod_base = cm
  modified_base 1..2: mod_base = OTHER; note R-N-(1,3-dimethylimidazolidin-2-ylidene)phosphoramidate
  modified_base 2: mod_base = cm
  modified_base 2..3: mod_base = OTHER; note = S-phosphorothioate
  modified_base 3: mod_base = cm
  modified_base 3..4: mod_base = OTHER; note = S-phosphorothioate
  modified_base 4: mod_base = OTHER; note = 2-fluororibose adenine
  modified_base 4..5: mod_base = OTHER; note = S-phosphorothioate
  modified_base 5: mod_base = OTHER; note = 2-fluororibose guanine
  modified_base 5..6: mod_base = OTHER; note = S-phosphorothioate
  modified_base 6: mod_base = cm
  modified_base 7: mod_base = OTHER; note = 2-O-methylribose adenine
  modified_base 7..8: mod_base = OTHER; note = S-phosphorothioate
  modified_base 8: mod_base = OTHER; note = 2-fluororibose guanine
  modified_base 8..9: mod_base = OTHER; note = S-phosphorothioate
  modified_base 9: mod_base = OTHER; note = 2-fluororibose cytosine
  modified_base 10: mod_base = um
  modified_base 10..11: mod_base = OTHER; note = S-phosphorothioate
  modified_base 11: mod_base = OTHER; note = 2-fluororibose uracil
  modified_base 11..12: mod_base = OTHER; note R-N-(1,3-dimethylimidazolidin-2-ylidene)phosphoramidate
  modified_base 12: mod_base = cm
  modified_base 13: mod_base = OTHER; note = 2-fluororibose adenine
  modified_base 13..14: mod_base = OTHER; note = S-phosphorothioate
  modified_base 14: mod_base = OTHER; note = 2-fluororibose guanine
  modified_base 14..15: mod_base = OTHER; note R-N-(1,3-dimethylimidazolidin-2-ylidene)phosphoramidate
  modified_base 15: mod_base = OTHER; note = 2-fluororibose uracil
  modified_base 16: mod_base = cm
  modified_base 16..17: mod_base = OTHER; note = S-phosphorothioate
  modified_base 17: mod_base = OTHER; note = 2-fluororibose cytosine
  modified_base 17..18: mod_base = OTHER; note = S-phosphorothioate
  modified_base 18: mod_base = OTHER; note = 2-fluororibose cytosine
  modified_base 18..19: mod_base = OTHER; note = S-phosphorothioate
  modified_base 19: mod_base = OTHER; note = 2-fluororibose uracil
  modified_base 19..20: mod_base = OTHER; note = S-phosphorothioate
  modified_base 20: mod_base = um
  modified_base 21: mod_base = um
  modified_base 22: mod_base = OTHER; note = 2-fluororibose cytosine
  modified_base 22..23: mod_base = OTHER; note = S-phosphorothioate
  modified_base 23: mod_base = OTHER; note = deoxyribose 6-deamino-oxo-adenine
  modified_base 23..24: mod_base = OTHER; note = S-phosphorothioate
  modified_base 24: mod_base = OTHER; note = deoxyribose uracil (position 3 connectivity)
  modified_base 24..25: mod_base = OTHER; note = S-phosphorothioate
  modified_base 25: mod_base = OTHER; note = deoxyribose inosine
  modified_base 25..26: mod_base = OTHER; note S-N-(1,3-dimethylimidazolidin-2-ylidene)phosphoramidate
  modified_base 26: mod_base = um
  modified_base 27: mod_base = OTHER; note = 2-fluororibose cytosine
  modified_base 27..28: mod_base = OTHER; note = S-phosphorothioate
  modified_base 28: mod_base = gm
  modified_base 28..29: mod_base = OTHER; note = S-phosphorothioate
  modified_base 29: mod_base = OTHER; note = 2-O-methylribose adenine
  modified_base 29..30: mod_base = OTHER; note R-N-(1,3-dimethylimidazolidin-2-ylidene)phosphoramidate
  modified_base 30: mod_base = um
  source 1..30: mol_type = other RNA

SEQ ID NO: 444 - RNA, 30 nt, synthetic construct; identical to SEQ ID NO: 306
  misc_feature 1..30: note = Synthetic: WV-47355
  misc_feature 1..30: note = Synthetic: ADR-0104232
  modified_base 1: mod_base = cm
  modified_base 1..2: mod_base = OTHER; note R-N-(1,3-dimethylimidazolidin-2-ylidene)phosphoramidate
  modified_base 2: mod_base = cm
  modified_base 2..3: mod_base = OTHER; note = S-phosphorothioate
  modified_base 3: mod_base = cm
  modified_base 3..4: mod_base = OTHER; note = S-phosphorothioate
  modified_base 4: mod_base = OTHER; note = 2-fluororibose adenine
  modified_base 4..5: mod_base = OTHER; note = S-phosphorothioate
  modified_base 5: mod_base = OTHER; note = 2-fluororibose guanine
  modified_base 5..6: mod_base = OTHER; note = S-phosphorothioate
  modified_base 6: mod_base = cm
  modified_base 7: mod_base = OTHER; note = 2-O-methylribose adenine
  modified_base 7..8: mod_base = OTHER; note = S-phosphorothioate
  modified_base 8: mod_base = OTHER; note = 2-fluororibose guanine
  modified_base 8..9: mod_base = OTHER; note = S-phosphorothioate
  modified_base 9: mod_base = OTHER; note = 2-fluororibose cytosine
  modified_base 10: mod_base = um
  modified_base 10..11: mod_base = OTHER; note = S-phosphorothioate
  modified_base 11: mod_base = OTHER; note = 2-fluororibose uracil
  modified_base 11..12: mod_base = OTHER; note R-N-(1,3-dimethylimidazolidin-2-ylidene)phosphoramidate
  modified_base 12: mod_base = cm
  modified_base 13: mod_base = OTHER; note = 2-fluororibose adenine
  modified_base 13..14: mod_base = OTHER; note = S-phosphorothioate
  modified_base 14: mod_base = OTHER; note = 2-fluororibose guanine
  modified_base 14..15: mod_base = OTHER; note R-N-(1,3-dimethylimidazolidin-2-ylidene)phosphoramidate
  modified_base 15: mod_base = OTHER; note = 2-fluororibose uracil
  modified_base 16: mod_base = cm
  modified_base 16..17: mod_base = OTHER; note = S-phosphorothioate
  modified_base 17: mod_base = OTHER; note = 2-fluororibose cytosine
  modified_base 17..18: mod_base = OTHER; note = S-phosphorothioate
  modified_base 18: mod_base = OTHER; note = 2-fluororibose cytosine
  modified_base 18..19: mod_base = OTHER; note = S-phosphorothioate
  modified_base 19: mod_base = OTHER; note = 2-fluororibose uracil
  modified_base 19..20: mod_base = OTHER; note = S-phosphorothioate
  modified_base 20: mod_base = um
  modified_base 21: mod_base = um
  modified_base 22: mod_base = OTHER; note = 2-fluororibose cytosine
  modified_base 22..23: mod_base = OTHER; note = S-phosphorothioate
  modified_base 23: mod_base = OTHER; note = deoxyribose 2-hydroxybenzimidazole
  modified_base 23..24: mod_base = OTHER; note = S-phosphorothioate
  modified_base 24: mod_base = OTHER; note = deoxyribose uracil (position 3 connectivity)
  modified_base 24..25: mod_base = OTHER; note = S-phosphorothioate
  modified_base 25: mod_base = OTHER; note = deoxyribose inosine
  modified_base 25..26: mod_base = OTHER; note S-N-(1,3-dimethylimidazolidin-2-ylidene)phosphoramidate
  modified_base 26: mod_base = um
  modified_base 27: mod_base = OTHER; note = 2-fluororibose cytosine
  modified_base 27..28: mod_base = OTHER; note = S-phosphorothioate
  modified_base 28: mod_base = gm
  modified_base 28..29: mod_base = OTHER; note = S-phosphorothioate
  modified_base 29: mod_base = OTHER; note = 2-O-methylribose adenine
  modified_base 29..30: mod_base = OTHER; note R-N-(1,3-dimethylimidazolidin-2-ylidene)phosphoramidate
  modified_base 30: mod_base = um
  source 1..30: mol_type = other RNA

SEQ ID NO: 445 - RNA, 30 nt, synthetic construct; identical to SEQ ID NO: 273
  misc_feature 1..30: note = Synthetic: WV-47356
  misc_feature 1..30: note = Synthetic: ADR-0104220
  modified_base 1: mod_base = cm
  modified_base 1..2: mod_base = OTHER; note R-N-(1,3-dimethylimidazolidin-2-ylidene)phosphoramidate
  modified_base 2: mod_base = cm
  modified_base 2..3: mod_base = OTHER; note = S-phosphorothioate
  modified_base 3: mod_base = cm
  modified_base 3..4: mod_base = OTHER; note = S-phosphorothioate
  modified_base 4: mod_base = OTHER; note = 2-fluororibose adenine
  modified_base 4..5: mod_base = OTHER; note = S-phosphorothioate
  modified_base 5: mod_base = OTHER; note = 2-fluororibose guanine
  modified_base 5..6: mod_base = OTHER; note = S-phosphorothioate
  modified_base 6: mod_base = cm
  modified_base 7: mod_base = OTHER; note = 2-O-methylribose adenine
  modified_base 7..8: mod_base = OTHER; note = S-phosphorothioate
  modified_base 8: mod_base = OTHER; note = 2-fluororibose guanine
  modified_base 8..9: mod_base = OTHER; note = S-phosphorothioate
  modified_base 9: mod_base = OTHER; note = 2-fluororibose cytosine
  modified_base 10: mod_base = um
  modified_base 10..11: mod_base = OTHER; note = S-phosphorothioate
  modified_base 11: mod_base = OTHER; note = 2-fluororibose uracil
  modified_base 11..12: mod_base = OTHER; note R-N-(1,3-dimethylimidazolidin-2-ylidene)phosphoramidate
  modified_base 12: mod_base = cm
  modified_base 13: mod_base = OTHER; note = 2-fluororibose adenine
  modified_base 13..14: mod_base = OTHER; note = S-phosphorothioate
  modified_base 14: mod_base = OTHER; note = 2-fluororibose guanine
  modified_base 14..15: mod_base = OTHER; note R-N-(1,3-dimethylimidazolidin-2-ylidene)phosphoramidate
  modified_base 15: mod_base = OTHER; note = 2-fluororibose uracil
  modified_base 16: mod_base = cm
  modified_base 16..17: mod_base = OTHER; note = S-phosphorothioate
  modified_base 17: mod_base = OTHER; note = 2-fluororibose cytosine
  modified_base 17..18: mod_base = OTHER; note = S-phosphorothioate
  modified_base 18: mod_base = OTHER; note = 2-fluororibose cytosine
  modified_base 18..19: mod_base = OTHER; note = S-phosphorothioate
  modified_base 19: mod_base = OTHER; note = 2-fluororibose uracil
  modified_base 19..20: mod_base = OTHER; note = S-phosphorothioate
  modified_base 20: mod_base = um
  modified_base 21: mod_base = um
  modified_base 22: mod_base = OTHER; note = 2-fluororibose cytosine
  modified_base 22..23: mod_base = OTHER; note = S-phosphorothioate
  modified_base 23: mod_base = OTHER; note = deoxyribose uracil (position 3 connectivity)
  modified_base 23..24: mod_base = OTHER; note = S-phosphorothioate
  modified_base 24: mod_base = OTHER; note = deoxyribose uracil (position 3 connectivity)
  modified_base 24..25: mod_base = OTHER; note = S-phosphorothioate
  modified_base 25: mod_base = OTHER; note = deoxyribose inosine
  modified_base 25..26: mod_base = OTHER; note S-N-(1,3-dimethylimidazolidin-2-ylidene)phosphoramidate
  modified_base 26: mod_base = um
  modified_base 27: mod_base = OTHER; note = 2-fluororibose cytosine
  modified_base 27..28: mod_base = OTHER; note = S-phosphorothioate
  modified_base 28: mod_base = gm
  modified_base 28..29: mod_base = OTHER; note = S-phosphorothioate
  modified_base 29: mod_base = OTHER; note = 2-O-methylribose adenine
  modified_base 29..30: mod_base = OTHER; note R-N-(1,3-dimethylimidazolidin-2-ylidene)phosphoramidate
  modified_base 30: mod_base = um
  source 1..30: mol_type = other RNA

SEQ ID NO: 446 - RNA, 30 nt, synthetic construct; identical to SEQ ID NO: 305
  misc_feature 1..30: note = Synthetic: WV-47357
  misc_feature 1..30: note = Synthetic: ADR-0104238
  modified_base 1: mod_base = cm
  modified_base 1..2: mod_base = OTHER; note R-N-(1,3-dimethylimidazolidin-2-ylidene)phosphoramidate
  modified_base 2: mod_base = cm
  modified_base 2..3: mod_base = OTHER; note = S-phosphorothioate
  modified_base 3: mod_base = cm
  modified_base 3..4: mod_base = OTHER; note = S-phosphorothioate
  modified_base 4: mod_base = OTHER; note = 2-fluororibose adenine
  modified_base 4..5: mod_base = OTHER; note = S-phosphorothioate
  modified_base 5: mod_base = OTHER; note = 2-fluororibose guanine
  modified_base 5..6: mod_base = OTHER; note = S-phosphorothioate
  modified_base 6: mod_base = cm
  modified_base 7: mod_base = OTHER; note = 2-O-methylribose adenine
  modified_base 7..8: mod_base = OTHER; note = S-phosphorothioate
  modified_base 8: mod_base = OTHER; note = 2-fluororibose guanine
  modified_base 8..9: mod_base = OTHER; note = S-phosphorothioate
  modified_base 9: mod_base = OTHER; note = 2-fluororibose cytosine
  modified_base 10: mod_base = um
  modified_base 10..11: mod_base = OTHER; note = S-phosphorothioate
  modified_base 11: mod_base = OTHER; note = 2-fluororibose uracil
  modified_base 11..12: mod_base = OTHER; note R-N-(1,3-dimethylimidazolidin-2-ylidene)phosphoramidate
  modified_base 12: mod_base = cm
  modified_base 13: mod_base = OTHER; note = 2-fluororibose adenine
  modified_base 13..14: mod_base = OTHER; note = S-phosphorothioate
  modified_base 14: mod_base = OTHER; note = 2-fluororibose guanine
  modified_base 14..15: mod_base = OTHER; note R-N-(1,3-dimethylimidazolidin-2-ylidene)phosphoramidate
  modified_base 15: mod_base = OTHER; note = 2-fluororibose uracil
  modified_base 16: mod_base = cm
  modified_base 16..17: mod_base = OTHER; note = S-phosphorothioate
  modified_base 17: mod_base = OTHER; note = 2-fluororibose cytosine
  modified_base 17..18: mod_base = OTHER; note = S-phosphorothioate
  modified_base 18: mod_base = OTHER; note = 2-fluororibose cytosine
  modified_base 18..19: mod_base = OTHER; note = S-phosphorothioate
  modified_base 19: mod_base = OTHER; note = 2-fluororibose uracil
  modified_base 19..20: mod_base = OTHER; note = S-phosphorothioate
  modified_base 20: mod_base = um
  modified_base 21: mod_base = um
  modified_base 22: mod_base = OTHER; note = 2-fluororibose cytosine
  modified_base 22..23: mod_base = OTHER; note = S-phosphorothioate
  modified_base 23: mod_base = OTHER; note = deoxyribose pseudoisocytidine, 5 connectivity
  modified_base 23..24: mod_base = OTHER; note = S-phosphorothioate
  modified_base 24: mod_base = OTHER; note = deoxyribose uracil (position 3 connectivity)
  modified_base 24..25: mod_base = OTHER; note = S-phosphorothioate
  modified_base 25: mod_base = OTHER; note = deoxyribose inosine
  modified_base 25..26: mod_base = OTHER; note S-N-(1,3-dimethylimidazolidin-2-ylidene)phosphoramidate
  modified_base 26: mod_base = um
  modified_base 27: mod_base = OTHER; note = 2-fluororibose cytosine
  modified_base 27..28: mod_base = OTHER; note = S-phosphorothioate
  modified_base 28: mod_base = gm
  modified_base 28..29: mod_base = OTHER; note = S-phosphorothioate
  modified_base 29: mod_base = OTHER; note = 2-O-methylribose adenine
  modified_base 29..30: mod_base = OTHER; note R-N-(1,3-dimethylimidazolidin-2-ylidene)phosphoramidate
  modified_base 30: mod_base = um
  source 1..30: mol_type = other RNA

SEQ ID NO: 447 - RNA, 30 nt, synthetic construct; identical to SEQ ID NO: 305
  misc_feature 1..30: note = Synthetic: WV-47358
  misc_feature 1..30: note = Synthetic: ADR-0104228
  modified_base 1: mod_base = cm
  modified_base 1..2: mod_base = OTHER; note R-N-(1,3-dimethylimidazolidin-2-ylidene)phosphoramidate
  modified_base 2: mod_base = cm
  modified_base 2..3: mod_base = OTHER; note = S-phosphorothioate
  modified_base 3: mod_base = cm
  modified_base 3..4: mod_base = OTHER; note = S-phosphorothioate
  modified_base 4: mod_base = OTHER; note = 2-fluororibose adenine
  modified_base 4..5: mod_base = OTHER; note = S-phosphorothioate
  modified_base 5: mod_base = OTHER; note = 2-fluororibose guanine
  modified_base 5..6: mod_base = OTHER; note = S-phosphorothioate
  modified_base 6: mod_base = cm
  modified_base 7: mod_base = OTHER; note = 2-O-methylribose adenine
  modified_base 7..8: mod_base = OTHER; note = S-phosphorothioate
  modified_base 8: mod_base = OTHER; note = 2-fluororibose guanine
  modified_base 8..9: mod_base = OTHER; note = S-phosphorothioate
  modified_base 9: mod_base = OTHER; note = 2-fluororibose cytosine
  modified_base 10: mod_base = um
  modified_base 10..11: mod_base = OTHER; note = S-phosphorothioate
  modified_base 11: mod_base = OTHER; note = 2-fluororibose uracil
  modified_base 11..12: mod_base = OTHER; note R-N-(1,3-dimethylimidazolidin-2-ylidene)phosphoramidate
  modified_base 12: mod_base = cm
  modified_base 13: mod_base = OTHER; note = 2-fluororibose adenine
  modified_base 13..14: mod_base = OTHER; note = S-phosphorothioate
  modified_base 14: mod_base = OTHER; note = 2-fluororibose guanine
  modified_base 14..15: mod_base = OTHER; note R-N-(1,3-dimethylimidazolidin-2-ylidene)phosphoramidate
  modified_base 15: mod_base = OTHER; note = 2-fluororibose uracil
  modified_base 16: mod_base = cm
  modified_base 16..17: mod_base = OTHER; note = S-phosphorothioate
  modified_base 17: mod_base = OTHER; note = 2-fluororibose cytosine
  modified_base 17..18: mod_base = OTHER; note = S-phosphorothioate
  modified_base 18: mod_base = OTHER; note = 2-fluororibose cytosine
  modified_base 18..19: mod_base = OTHER; note = S-phosphorothioate
  modified_base 19: mod_base = OTHER; note = 2-fluororibose uracil
  modified_base 19..20: mod_base = OTHER; note = S-phosphorothioate
  modified_base 20: mod_base = um
  modified_base 21: mod_base = um
  modified_base 22: mod_base = OTHER; note = 2-fluororibose cytosine
  modified_base 22..23: mod_base = OTHER; note = S-phosphorothioate
  modified_base 23: mod_base = OTHER; note = deoxyribose 5-methylisocytosine
  modified_base 23..24: mod_base = OTHER; note = phosphorothioate
  modified_base 24: mod_base = OTHER; note = deoxyribose uracil (position 3 connectivity)
  modified_base 24..25: mod_base = OTHER; note = S-phosphorothioate
  modified_base 25: mod_base = OTHER; note = deoxyribose inosine
  modified_base 25..26: mod_base = OTHER; note S-N-(1,3-dimethylimidazolidin-2-ylidene)phosphoramidate
  modified_base 26: mod_base = um
  modified_base 27: mod_base = OTHER; note = 2-fluororibose cytosine
  modified_base 27..28: mod_base = OTHER; note = S-phosphorothioate
  modified_base 28: mod_base = gm
  modified_base 28..29: mod_base = OTHER; note = S-phosphorothioate
  modified_base 29: mod_base = OTHER; note = 2-O-methylribose adenine
  modified_base 29..30: mod_base = OTHER; note R-N-(1,3-dimethylimidazolidin-2-ylidene)phosphoramidate
  modified_base 30: mod_base = um
  source 1..30: mol_type = other RNA

SEQ ID NO: 448 - RNA, 30 nt, synthetic construct; identical to SEQ ID NO: 273
  misc_feature 1..30: note = Synthetic: WV-47359
  misc_feature 1..30: note = Synthetic: ADR-0104128
  modified_base 1: mod_base = cm
  modified_base 1..2: mod_base = OTHER; note R-N-(1,3-dimethylimidazolidin-2-ylidene)phosphoramidate
  modified_base 2: mod_base = cm
  modified_base 2..3: mod_base = OTHER; note = S-phosphorothioate
  modified_base 3: mod_base = cm
  modified_base 3..4: mod_base = OTHER; note = S-phosphorothioate
  modified_base 4: mod_base = OTHER; note = 2-fluororibose adenine
  modified_base 4..5: mod_base = OTHER; note = S-phosphorothioate
  modified_base 5: mod_base = OTHER; note = 2-fluororibose guanine
  modified_base 5..6: mod_base = OTHER; note = S-phosphorothioate
  modified_base 6: mod_base = cm
  modified_base 7: mod_base = OTHER; note = 2-O-methylribose adenine
  modified_base 7..8: mod_base = OTHER; note = S-phosphorothioate
  modified_base 8: mod_base = OTHER; note = 2-fluororibose guanine
  modified_base 8..9: mod_base = OTHER; note = S-phosphorothioate
  modified_base 9: mod_base = OTHER; note = 2-fluororibose cytosine
  modified_base 10: mod_base = um
  modified_base 10..11: mod_base = OTHER; note = S-phosphorothioate
  modified_base 11: mod_base = OTHER; note = 2-fluororibose uracil
  modified_base 11..12: mod_base = OTHER; note R-N-(1,3-dimethylimidazolidin-2-ylidene)phosphoramidate
  modified_base 12: mod_base = cm
  modified_base 13: mod_base = OTHER; note = 2-fluororibose adenine
  modified_base 13..14: mod_base = OTHER; note = S-phosphorothioate
  modified_base 14: mod_base = OTHER; note = 2-fluororibose guanine
  modified_base 14..15: mod_base = OTHER; note R-N-(1,3-dimethylimidazolidin-2-ylidene)phosphoramidate
  modified_base 15: mod_base = OTHER; note = 2-fluororibose uracil
  modified_base 16: mod_base = cm
  modified_base 16..17: mod_base = OTHER; note = S-phosphorothioate
  modified_base 17: mod_base = OTHER; note = 2-fluororibose cytosine
  modified_base 17..18: mod_base = OTHER; note = S-phosphorothioate
  modified_base 18: mod_base = OTHER; note = 2-fluororibose cytosine
  modified_base 18..19: mod_base = OTHER; note = S-phosphorothioate
  modified_base 19: mod_base = OTHER; note = 2-fluororibose uracil
  modified_base 19..20: mod_base = OTHER; note = S-phosphorothioate
  modified_base 20: mod_base = um
  modified_base 21: mod_base = um
  modified_base 22: mod_base = OTHER; note = 2-fluororibose cytosine
  modified_base 22..23: mod_base = OTHER; note = S-phosphorothioate
  modified_base 23: mod_base = OTHER; note = S-propanetriol thymine
  modified_base 23..24: mod_base = OTHER; note = S-phosphorothioate
  modified_base 24: mod_base = OTHER; note = deoxyribose uracil (position 3 connectivity)
  modified_base 24..25: mod_base = OTHER; note = S-phosphorothioate
  modified_base 25: mod_base = OTHER; note = deoxyribose inosine
  modified_base 25..26: mod_base = OTHER; note S-N-(1,3-dimethylimidazolidin-2-ylidene)phosphoramidate
  modified_base 26: mod_base = um
  modified_base 27: mod_base = OTHER; note = 2-fluororibose cytosine
  modified_base 27..28: mod_base = OTHER; note = S-phosphorothioate
  modified_base 28: mod_base = gm
  modified_base 28..29: mod_base = OTHER; note = S-phosphorothioate
  modified_base 29: mod_base = OTHER; note = 2-O-methylribose adenine
  modified_base 29..30: mod_base = OTHER; note R-N-(1,3-dimethylimidazolidin-2-ylidene)phosphoramidate
  modified_base 30: mod_base = um
  source 1..30: mol_type = other RNA

SEQ ID NO: 449 - RNA, 30 nt, synthetic construct; identical to SEQ ID NO: 273
  misc_feature 1..30: note = Synthetic: WV-47360
  misc_feature 1..30: note = Synthetic: ADR-0104126
  modified_base 1: mod_base = cm
  modified_base 1..2: mod_base = OTHER; note R-N-(1,3-dimethylimidazolidin-2-ylidene)phosphoramidate
  modified_base 2: mod_base = cm
  modified_base 2..3: mod_base = OTHER; note = S-phosphorothioate
  modified_base 3: mod_base = cm
  modified_base 3..4: mod_base = OTHER; note = S-phosphorothioate
  modified_base 4: mod_base = OTHER; note = 2-fluororibose adenine
  modified_base 4..5: mod_base = OTHER; note = S-phosphorothioate
  modified_base 5: mod_base = OTHER; note = 2-fluororibose guanine
  modified_base 5..6: mod_base = OTHER; note = S-phosphorothioate
  modified_base 6: mod_base = cm
  modified_base 7: mod_base = OTHER; note = 2-O-methylribose adenine
  modified_base 7..8: mod_base = OTHER; note = S-phosphorothioate
  modified_base 8: mod_base = OTHER; note = 2-fluororibose guanine
  modified_base 8..9: mod_base = OTHER; note = S-phosphorothioate
  modified_base 9: mod_base = OTHER; note = 2-fluororibose cytosine
  modified_base 10: mod_base = um
  modified_base 10..11: mod_base = OTHER; note = S-phosphorothioate
  modified_base 11: mod_base = OTHER; note = 2-fluororibose uracil
  modified_base 11..12: mod_base = OTHER; note R-N-(1,3-dimethylimidazolidin-2-ylidene)phosphoramidate
  modified_base 12: mod_base = cm
  modified_base 13: mod_base = OTHER; note = 2-fluororibose adenine
  modified_base 13..14: mod_base = OTHER; note = S-phosphorothioate
  modified_base 14: mod_base = OTHER; note = 2-fluororibose guanine
  modified_base 14..15: mod_base = OTHER; note R-N-(1,3-dimethylimidazolidin-2-ylidene)phosphoramidate
  modified_base 15: mod_base = OTHER; note = 2-fluororibose uracil
  modified_base 16: mod_base = cm
  modified_base 16..17: mod_base = OTHER; note = S-phosphorothioate
  modified_base 17: mod_base = OTHER; note = 2-fluororibose cytosine
  modified_base 17..18: mod_base = OTHER; note = S-phosphorothioate
  modified_base 18: mod_base = OTHER; note = 2-fluororibose cytosine
  modified_base 18..19: mod_base = OTHER; note = S-phosphorothioate
  modified_base 19: mod_base = OTHER; note = 2-fluororibose uracil
  modified_base 19..20: mod_base = OTHER; note = S-phosphorothioate
  modified_base 20: mod_base = um
  modified_base 21: mod_base = um
  modified_base 22: mod_base = OTHER; note = 2-fluororibose cytosine
  modified_base 22..23: mod_base = OTHER; note = S-phosphorothioate
  modified_base 23: mod_base = OTHER; note = R-propanetriol thymine
  modified_base 23..24: mod_base = OTHER; note = S-phosphorothioate
  modified_base 24: mod_base = OTHER; note = deoxyribose uracil (position 3 connectivity)
  modified_base 24..25: mod_base = OTHER; note = S-phosphorothioate
  modified_base 25: mod_base = OTHER; note = deoxyribose inosine
  modified_base 25..26: mod_base = OTHER; note S-N-(1,3-dimethylimidazolidin-2-ylidene)phosphoramidate
  modified_base 26: mod_base = um
  modified_base 27: mod_base = OTHER; note = 2-fluororibose cytosine
  modified_base 27..28: mod_base = OTHER; note = S-phosphorothioate
  modified_base 28: mod_base = gm
  modified_base 28..29: mod_base = OTHER; note = S-phosphorothioate
  modified_base 29: mod_base = OTHER; note = 2-O-methylribose adenine
  modified_base 29..30: mod_base = OTHER; note R-N-(1,3-dimethylimidazolidin-2-ylidene)phosphoramidate
  modified_base 30: mod_base = um
  source 1..30: mol_type = other RNA

SEQ ID NO: 450 - RNA, 30 nt, synthetic construct; identical to SEQ ID NO: 305
  misc_feature 1..30: note = Synthetic: WV-47361
  misc_feature 1..30: note = Synthetic: ADR-0104236
  modified_base 1: mod_base = cm
  modified_base 1..2: mod_base = OTHER; note R-N-(1,3-dimethylimidazolidin-2-ylidene)phosphoramidate
  modified_base 2: mod_base = cm
  modified_base 2..3: mod_base = OTHER; note = S-phosphorothioate
  modified_base 3: mod_base = cm
  modified_base 3..4: mod_base = OTHER; note = S-phosphorothioate
  modified_base 4: mod_base = OTHER; note = 2-fluororibose adenine
  modified_base 4..5: mod_base = OTHER; note = S-phosphorothioate
  modified_base 5: mod_base = OTHER; note = 2-fluororibose guanine
  modified_base 5..6: mod_base = OTHER; note = S-phosphorothioate
  modified_base 6: mod_base = cm
  modified_base 7: mod_base = OTHER; note = 2-O-methylribose adenine
  modified_base 7..8: mod_base = OTHER; note = S-phosphorothioate
  modified_base 8: mod_base = OTHER; note = 2-fluororibose guanine
  modified_base 8..9: mod_base = OTHER; note = S-phosphorothioate
  modified_base 9: mod_base = OTHER; note = 2-fluororibose cytosine
  modified_base 10: mod_base = um
  modified_base 10..11: mod_base = OTHER; note = S-phosphorothioate
  modified_base 11: mod_base = OTHER; note = 2-fluororibose uracil
  modified_base 11..12: mod_base = OTHER; note R-N-(1,3-dimethylimidazolidin-2-ylidene)phosphoramidate
  modified_base 12: mod_base = cm
  modified_base 13: mod_base = OTHER; note = 2-fluororibose adenine
  modified_base 13..14: mod_base = OTHER; note = S-phosphorothioate
  modified_base 14: mod_base = OTHER; note = 2-fluororibose guanine
  modified_base 14..15: mod_base = OTHER; note R-N-(1,3-dimethylimidazolidin-2-ylidene)phosphoramidate
  modified_base 15: mod_base = OTHER; note = 2-fluororibose uracil
  modified_base 16: mod_base = cm
  modified_base 16..17: mod_base = OTHER; note = S-phosphorothioate
  modified_base 17: mod_base = OTHER; note = 2-fluororibose cytosine
  modified_base 17..18: mod_base = OTHER; note = S-phosphorothioate
  modified_base 18: mod_base = OTHER; note = 2-fluororibose cytosine
  modified_base 18..19: mod_base = OTHER; note = S-phosphorothioate
  modified_base 19: mod_base = OTHER; note = 2-fluororibose uracil
  modified_base 19..20: mod_base = OTHER; note = S-phosphorothioate
  modified_base 20: mod_base = um
  modified_base 21: mod_base = um
  modified_base 22: mod_base = OTHER; note = 2-fluororibose cytosine
  modified_base 22..23: mod_base = OTHER; note = S-phosphorothioate
  modified_base 23: mod_base = OTHER; note = deoxyribose N-[(phenylamino)carbonyl]-cytosine
  modified_base 23..24: mod_base = OTHER; note = S-phosphorothioate
  modified_base 24: mod_base = OTHER; note = deoxyribose uracil (position 3 connectivity)
  modified_base 24..25: mod_base = OTHER; note = S-phosphorothioate
  modified_base 25: mod_base = OTHER; note = deoxyribose inosine
  modified_base 25..26: mod_base = OTHER; note S-N-(1,3-dimethylimidazolidin-2-ylidene)phosphoramidate
  modified_base 26: mod_base = um
  modified_base 27: mod_base = OTHER; note = 2-fluororibose cytosine
  modified_base 27..28: mod_base = OTHER; note = S-phosphorothioate
  modified_base 28: mod_base = gm
  modified_base 28..29: mod_base = OTHER; note = S-phosphorothioate
  modified_base 29: mod_base = OTHER; note = 2-O-methylribose adenine
  modified_base 29..30: mod_base = OTHER; note R-N-(1,3-dimethylimidazolidin-2-ylidene)phosphoramidate
  modified_base 30: mod_base = um
  source 1..30: mol_type = other RNA

SEQ ID NO: 451 - RNA, 30 nt, synthetic construct; identical to SEQ ID NO: 305
  misc_feature 1..30: note = Synthetic: WV-47362
  misc_feature 1..30: note = Synthetic: ADR-0104230
  modified_base 1: mod_base = cm
  modified_base 1..2: mod_base = OTHER; note R-N-(1,3-dimethylimidazolidin-2-ylidene)phosphoramidate
  modified_base 2: mod_base = cm
  modified_base 2..3: mod_base = OTHER; note = S-phosphorothioate
  modified_base 3: mod_base = cm
  modified_base 3..4: mod_base = OTHER; note = S-phosphorothioate
  modified_base 4: mod_base = OTHER; note = 2-fluororibose adenine
  modified_base 4..5: mod_base = OTHER; note = S-phosphorothioate
  modified_base 5: mod_base = OTHER; note = 2-fluororibose guanine
  modified_base 5..6: mod_base = OTHER; note = S-phosphorothioate
  modified_base 6: mod_base = cm
  modified_base 7: mod_base = OTHER; note = 2-O-methylribose adenine
  modified_base 7..8: mod_base = OTHER; note = S-phosphorothioate
  modified_base 8: mod_base = OTHER; note = 2-fluororibose guanine
  modified_base 8..9: mod_base = OTHER; note = S-phosphorothioate
  modified_base 9: mod_base = OTHER; note = 2-fluororibose cytosine
  modified_base 10: mod_base = um
  modified_base 10..11: mod_base = OTHER; note = S-phosphorothioate
  modified_base 11: mod_base = OTHER; note = 2-fluororibose uracil
  modified_base 11..12: mod_base = OTHER; note R-N-(1,3-dimethylimidazolidin-2-ylidene)phosphoramidate
  modified_base 12: mod_base = cm
  modified_base 13: mod_base = OTHER; note = 2-fluororibose adenine
  modified_base 13..14: mod_base = OTHER; note = S-phosphorothioate
  modified_base 14: mod_base = OTHER; note = 2-fluororibose guanine
  modified_base 14..15: mod_base = OTHER; note R-N-(1,3-dimethylimidazolidin-2-ylidene)phosphoramidate
  modified_base 15: mod_base = OTHER; note = 2-fluororibose uracil
  modified_base 16: mod_base = cm
  modified_base 16..17: mod_base = OTHER; note = S-phosphorothioate
  modified_base 17: mod_base = OTHER; note = 2-fluororibose cytosine
  modified_base 17..18: mod_base = OTHER; note = S-phosphorothioate
  modified_base 18: mod_base = OTHER; note = 2-fluororibose cytosine
  modified_base 18..19: mod_base = OTHER; note = S-phosphorothioate
  modified_base 19: mod_base = OTHER; note = 2-fluororibose uracil
  modified_base 19..20: mod_base = OTHER; note = S-phosphorothioate
  modified_base 20: mod_base = um
  modified_base 21: mod_base = um
  modified_base 22: mod_base = OTHER; note = 2-fluororibose cytosine
  modified_base 22..23: mod_base = OTHER; note = S-phosphorothioate
  modified_base 23: mod_base = OTHER; note = deoxyribose 4-N-naphthylcarbamoyl-cytidine
  modified_base 23..24: mod_base = OTHER; note = S-phosphorothioate
  modified_base 24: mod_base = OTHER; note = deoxyribose uracil (position 3 connectivity)
  modified_base 24..25: mod_base = OTHER; note = S-phosphorothioate
  modified_base 25: mod_base = OTHER; note = deoxyribose inosine
  modified_base 25..26: mod_base = OTHER; note S-N-(1,3-dimethylimidazolidin-2-ylidene)phosphoramidate
  modified_base 26: mod_base = um
  modified_base 27: mod_base = OTHER; note = 2-fluororibose cytosine
  modified_base 27..28: mod_base = OTHER; note = S-phosphorothioate
  modified_base 28: mod_base = gm
  modified_base 28..29: mod_base = OTHER; note = S-phosphorothioate
  modified_base 29: mod_base = OTHER; note = 2-O-methylribose adenine
  modified_base 29..30: mod_base = OTHER; note R-N-(1,3-dimethylimidazolidin-2-ylidene)phosphoramidate
  modified_base 30: mod_base = um
  source 1..30: mol_type = other RNA

SEQ ID NO: 452 - RNA, 30 nt, synthetic construct; identical to SEQ ID NO: 305
  misc_feature 1..30: note = Synthetic: WV-47363
  misc_feature 1..30: note = Synthetic: ADR-0104124
  modified_base 1: mod_base = cm
  modified_base 1..2: mod_base = OTHER; note R-N-(1,3-dimethylimidazolidin-2-ylidene)phosphoramidate
  modified_base 2: mod_base = cm
  modified_base 2..3: mod_base = OTHER; note = S-phosphorothioate
  modified_base 3: mod_base = cm
  modified_base 3..4: mod_base = OTHER; note = S-phosphorothioate
  modified_base 4: mod_base = OTHER; note = 2-fluororibose adenine
  modified_base 4..5: mod_base = OTHER; note = S-phosphorothioate
  modified_base 5: mod_base = OTHER; note = 2-fluororibose guanine
  modified_base 5..6: mod_base = OTHER; note = S-phosphorothioate
  modified_base 6: mod_base = cm
  modified_base 7: mod_base = OTHER; note = 2-O-methylribose adenine
  modified_base 7..8: mod_base = OTHER; note = S-phosphorothioate
  modified_base 8: mod_base = OTHER; note = 2-fluororibose guanine
  modified_base 8..9: mod_base = OTHER; note = S-phosphorothioate
  modified_base 9: mod_base = OTHER; note = 2-fluororibose cytosine
  modified_base 10: mod_base = um
  modified_base 10..11: mod_base = OTHER; note = S-phosphorothioate
  modified_base 11: mod_base = OTHER; note = 2-fluororibose uracil
  modified_base 11..12: mod_base = OTHER; note R-N-(1,3-dimethylimidazolidin-2-ylidene)phosphoramidate
  modified_base 12: mod_base = cm
  modified_base 13: mod_base = OTHER; note = 2-fluororibose adenine
  modified_base 13..14: mod_base = OTHER; note = S-phosphorothioate
  modified_base 14: mod_base = OTHER; note = 2-fluororibose guanine
  modified_base 14..15: mod_base = OTHER; note R-N-(1,3-dimethylimidazolidin-2-ylidene)phosphoramidate
  modified_base 15: mod_base = OTHER; note = 2-fluororibose uracil
  modified_base 16: mod_base = cm
  modified_base 16..17: mod_base = OTHER; note = S-phosphorothioate
  modified_base 17: mod_base = OTHER; note = 2-fluororibose cytosine
  modified_base 17..18: mod_base = OTHER; note = S-phosphorothioate
  modified_base 18: mod_base = OTHER; note = 2-fluororibose cytosine
  modified_base 18..19: mod_base = OTHER; note = S-phosphorothioate
  modified_base 19: mod_base = OTHER; note = 2-fluororibose uracil
  modified_base 19..20: mod_base = OTHER; note = S-phosphorothioate
  modified_base 20: mod_base = um
  modified_base 21: mod_base = um
  modified_base 22: mod_base = OTHER; note = 2-fluororibose cytosine
  modified_base 22..23: mod_base = OTHER; note = S-phosphorothioate
  modified_base 23: mod_base = OTHER; note = alpha-threofuranosyl (3-2 connectivity) cytosine
  modified_base 23..24: mod_base = OTHER; note = S-phosphorothioate
  modified_base 24: mod_base = OTHER; note = deoxyribose uracil (position 3 connectivity)
  modified_base 24..25: mod_base = OTHER; note = S-phosphorothioate
  modified_base 25: mod_base = OTHER; note = deoxyribose inosine
  modified_base 25..26: mod_base = OTHER; note S-N-(1,3-dimethylimidazolidin-2-ylidene)phosphoramidate
  modified_base 26: mod_base = um
  modified_base 27: mod_base = OTHER; note = 2-fluororibose cytosine
  modified_base 27..28: mod_base = OTHER; note = S-phosphorothioate
  modified_base 28: mod_base = gm
  modified_base 28..29: mod_base = OTHER; note = S-phosphorothioate
  modified_base 29: mod_base = OTHER; note = 2-O-methylribose adenine
  modified_base 29..30: mod_base = OTHER; note R-N-(1,3-dimethylimidazolidin-2-ylidene)phosphoramidate
  modified_base 30: mod_base = um
  source 1..30: mol_type = other RNA

SEQ ID NO: 453 - RNA, 30 nt, synthetic construct; identical to SEQ ID NO: 80
  misc_feature 1..30: note = Synthetic: WV-47364
  misc_feature 1..30: note = Synthetic: ADR-0104150
  modified_base 1: mod_base = cm
  modified_base 1..2: mod_base = OTHER; note R-N-(1,3-dimethylimidazolidin-2-ylidene)phosphoramidate
  modified_base 2: mod_base = cm
  modified_base 2..3: mod_base = OTHER; note = S-phosphorothioate
  modified_base 3: mod_base = cm
  modified_base 3..4: mod_base = OTHER; note = S-phosphorothioate
  modified_base 4: mod_base = OTHER; note = 2-fluororibose adenine
  modified_base 4..5: mod_base = OTHER; note = S-phosphorothioate
  modified_base 5: mod_base = OTHER; note = 2-fluororibose guanine
  modified_base 5..6: mod_base = OTHER; note = S-phosphorothioate
  modified_base 6: mod_base = cm
  modified_base 7: mod_base = OTHER; note = 2-O-methylribose adenine
  modified_base 7..8: mod_base = OTHER; note = S-phosphorothioate
  modified_base 8: mod_base = OTHER; note = 2-fluororibose guanine
  modified_base 8..9: mod_base = OTHER; note = S-phosphorothioate
  modified_base 9: mod_base = OTHER; note = 2-fluororibose cytosine
  modified_base 10: mod_base = um
  modified_base 10..11: mod_base = OTHER; note = S-phosphorothioate
  modified_base 11: mod_base = OTHER; note = 2-fluororibose uracil
  modified_base 11..12: mod_base = OTHER; note R-N-(1,3-dimethylimidazolidin-2-ylidene)phosphoramidate
  modified_base 12: mod_base = cm
  modified_base 13: mod_base = OTHER; note = 2-fluororibose adenine
  modified_base 13..14: mod_base = OTHER; note = S-phosphorothioate
  modified_base 14: mod_base = OTHER; note = 2-fluororibose guanine
  modified_base 14..15: mod_base = OTHER; note R-N-(1,3-dimethylimidazolidin-2-ylidene)phosphoramidate
  modified_base 15: mod_base = OTHER; note = 2-fluororibose uracil
  modified_base 16: mod_base = cm
  modified_base 16..17: mod_base = OTHER; note = S-phosphorothioate
  modified_base 17: mod_base = OTHER; note = 2-fluororibose cytosine
  modified_base 17..18: mod_base = OTHER; note = S-phosphorothioate
  modified_base 18: mod_base = OTHER; note = 2-fluororibose cytosine
  modified_base 18..19: mod_base = OTHER; note = S-phosphorothioate
  modified_base 19: mod_base = OTHER; note = 2-fluororibose uracil
  modified_base 19..20: mod_base = OTHER; note = S-phosphorothioate
  modified_base 20: mod_base = um
  modified_base 21: mod_base = um
  modified_base 22: mod_base = OTHER; note = 2-fluororibose cytosine
  modified_base 22..23: mod_base = OTHER; note = S-phosphorothioate
  modified_base 23: mod_base = OTHER; note = deoxyribose thymine
  modified_base 23..24: mod_base = OTHER; note = S-phosphorothioate
  modified_base 24: mod_base = OTHER; note = deoxyribose cytosine
  modified_base 24..25: mod_base = OTHER; note = S-phosphorothioate
  modified_base 25: mod_base = OTHER; note = deoxyribose inosine
  modified_base 25..26: mod_base = OTHER; note S-N-(1,3-dimethylimidazolidin-2-ylidene)phosphoramidate
  modified_base 26: mod_base = um
  modified_base 27: mod_base = OTHER; note = 2-fluororibose cytosine
  modified_base 27..28: mod_base = OTHER; note = S-phosphorothioate
  modified_base 28: mod_base = gm
  modified_base 28..29: mod_base = OTHER; note = S-phosphorothioate
  modified_base 29: mod_base = OTHER; note = 2-O-methylribose adenine
  modified_base 29..30: mod_base = OTHER; note R-N-(1,3-dimethylimidazolidin-2-ylidene)phosphoramidate
  modified_base 30: mod_base = um
  source 1..30: mol_type = other RNA

SEQ ID NO: 454 - RNA, 30 nt, synthetic construct
  misc_feature 1..30: note = Synthetic: WV-47365
  misc_feature 1..30: note = Synthetic: ADR-0104233
  modified_base 1: mod_base = cm
  modified_base 1..2: mod_base = OTHER; note R-N-(1,3-dimethylimidazolidin-2-ylidene)phosphoramidate
  modified_base 2: mod_base = cm
  modified_base 2..3: mod_base = OTHER; note = S-phosphorothioate
  modified_base 3: mod_base = cm
  modified_base 3..4: mod_base = OTHER; note = S-phosphorothioate
  modified_base 4: mod_base = OTHER; note = 2-fluororibose adenine
  modified_base 4..5: mod_base = OTHER; note = S-phosphorothioate
  modified_base 5: mod_base = OTHER; note = 2-fluororibose guanine
  modified_base 5..6: mod_base = OTHER; note = S-phosphorothioate
  modified_base 6: mod_base = cm
  modified_base 7: mod_base = OTHER; note = 2-O-methylribose adenine
  modified_base 7..8: mod_base = OTHER; note = S-phosphorothioate
  modified_base 8: mod_base = OTHER; note = 2-fluororibose guanine
  modified_base 8..9: mod_base = OTHER; note = S-phosphorothioate
  modified_base 9: mod_base = OTHER; note = 2-fluororibose cytosine
  modified_base 10: mod_base = um
  modified_base 10..11: mod_base = OTHER; note = S-phosphorothioate
  modified_base 11: mod_base = OTHER; note = 2-fluororibose uracil
  modified_base 11..12: mod_base = OTHER; note R-N-(1,3-dimethylimidazolidin-2-ylidene)phosphoramidate
  modified_base 12: mod_base = cm
  modified_base 13: mod_base = OTHER; note = 2-fluororibose adenine
  modified_base 13..14: mod_base = OTHER; note = S-phosphorothioate
  modified_base 14: mod_base = OTHER; note = 2-fluororibose guanine
  modified_base 14..15: mod_base = OTHER; note R-N-(1,3-dimethylimidazolidin-2-ylidene)phosphoramidate
  modified_base 15: mod_base = OTHER; note = 2-fluororibose uracil
  modified_base 16: mod_base = cm
  modified_base 16..17: mod_base = OTHER; note = S-phosphorothioate
  modified_base 17: mod_base = OTHER; note = 2-fluororibose cytosine
  modified_base 17..18: mod_base = OTHER; note = S-phosphorothioate
  modified_base 18: mod_base = OTHER; note = 2-fluororibose cytosine
  modified_base 18..19: mod_base = OTHER; note = S-phosphorothioate
  modified_base 19: mod_base = OTHER; note = 2-fluororibose uracil
  modified_base 19..20: mod_base = OTHER; note = S-phosphorothioate
  modified_base 20: mod_base = um
  modified_base 21: mod_base = um
  modified_base 22: mod_base = OTHER; note = 2-fluororibose cytosine
  modified_base 22..23: mod_base = OTHER; note = S-phosphorothioate
  modified_base 23: mod_base = OTHER; note = deoxyribose 6-amino-9-substituted 8,9-dihydro-7H-purin-8-one
  modified_base 23..24: mod_base = OTHER; note = S-phosphorothioate
  modified_base 24: mod_base = OTHER; note = deoxyribose cytosine
  modified_base 24..25: mod_base = OTHER; note = S-phosphorothioate
  modified_base 25: mod_base = OTHER; note = deoxyribose inosine
  modified_base 25..26: mod_base = OTHER; note S-N-(1,3-dimethylimidazolidin-2-ylidene)phosphoramidate
  modified_base 26: mod_base = um
  modified_base 27: mod_base = OTHER; note = 2-fluororibose cytosine
  modified_base 27..28: mod_base = OTHER; note = S-phosphorothioate
  modified_base 28: mod_base = gm
  modified_base 28..29: mod_base = OTHER; note = S-phosphorothioate
  modified_base 29: mod_base = OTHER; note = 2-O-methylribose adenine
  modified_base 29..30: mod_base = OTHER; note R-N-(1,3-dimethylimidazolidin-2-ylidene)phosphoramidate
  modified_base 30: mod_base = um
  source 1..30: mol_type = other RNA
cccagcagcttcagtccctttcacgtcgat

SEQ ID NO: 455 - RNA, 30 nt, synthetic construct; identical to SEQ ID NO: 454
  misc_feature 1..30: note = Synthetic: WV-47366
  misc_feature 1..30: note = Synthetic: ADR-0104221
  modified_base 1: mod_base = cm
  modified_base 1..2: mod_base = OTHER; note R-N-(1,3-dimethylimidazolidin-2-ylidene)phosphoramidate
  modified_base 2: mod_base = cm
  modified_base 2..3: mod_base = OTHER; note = S-phosphorothioate
  modified_base 3: mod_base = cm
  modified_base 3..4: mod_base = OTHER; note = S-phosphorothioate
  modified_base 4: mod_base = OTHER; note = 2-fluororibose adenine
  modified_base 4..5: mod_base = OTHER; note = S-phosphorothioate
  modified_base 5: mod_base = OTHER; note = 2-fluororibose guanine
  modified_base 5..6: mod_base = OTHER; note = S-phosphorothioate
  modified_base 6: mod_base = cm
  modified_base 7: mod_base = OTHER; note = 2-O-methylribose adenine
  modified_base 7..8: mod_base = OTHER; note = S-phosphorothioate
  modified_base 8: mod_base = OTHER; note = 2-fluororibose guanine
  modified_base 8..9: mod_base = OTHER; note = S-phosphorothioate
  modified_base 9: mod_base = OTHER; note = 2-fluororibose cytosine
  modified_base 10: mod_base = um
  modified_base 10..11: mod_base = OTHER; note = S-phosphorothioate
  modified_base 11: mod_base = OTHER; note = 2-fluororibose uracil
  modified_base 11..12: mod_base = OTHER; note R-N-(1,3-dimethylimidazolidin-2-ylidene)phosphoramidate
  modified_base 12: mod_base = cm
  modified_base 13: mod_base = OTHER; note = 2-fluororibose adenine
  modified_base 13..14: mod_base = OTHER; note = S-phosphorothioate
  modified_base 14: mod_base = OTHER; note = 2-fluororibose guanine
  modified_base 14..15: mod_base = OTHER; note R-N-(1,3-dimethylimidazolidin-2-ylidene)phosphoramidate
  modified_base 15: mod_base = OTHER; note = 2-fluororibose uracil
  modified_base 16: mod_base = cm
  modified_base 16..17: mod_base = OTHER; note = S-phosphorothioate
  modified_base 17: mod_base = OTHER; note = 2-fluororibose cytosine
  modified_base 17..18: mod_base = OTHER; note = S-phosphorothioate
  modified_base 18: mod_base = OTHER; note = 2-fluororibose cytosine
  modified_base 18..19: mod_base = OTHER; note = S-phosphorothioate
  modified_base 19: mod_base = OTHER; note = 2-fluororibose uracil
  modified_base 19..20: mod_base = OTHER; note = S-phosphorothioate
  modified_base 20: mod_base = um
  modified_base 21: mod_base = um
  modified_base 22: mod_base = OTHER; note = 2-fluororibose cytosine
  modified_base 22..23: mod_base = OTHER; note = S-phosphorothioate
  modified_base 23: mod_base = OTHER; note = deoxyribose 6-deamino-oxo-adenine
  modified_base 23..24: mod_base = OTHER; note = S-phosphorothioate
  modified_base 24: mod_base = OTHER; note = deoxyribose cytosine
  modified_base 24..25: mod_base = OTHER; note = S-phosphorothioate
  modified_base 25: mod_base = OTHER; note = deoxyribose inosine
  modified_base 25..26: mod_base = OTHER; note S-N-(1,3-dimethylimidazolidin-2-ylidene)phosphoramidate
  modified_base 26: mod_base = um
  modified_base 27: mod_base = OTHER; note = 2-fluororibose cytosine
  modified_base 27..28: mod_base = OTHER; note = S-phosphorothioate
  modified_base 28: mod_base = gm
  modified_base 28..29: mod_base = OTHER; note = S-phosphorothioate
  modified_base 29: mod_base = OTHER; note = 2-O-methylribose adenine
  modified_base 29..30: mod_base = OTHER; note R-N-(1,3-dimethylimidazolidin-2-ylidene)phosphoramidate
  modified_base 30: mod_base = um
  source 1..30: mol_type = other RNA

SEQ ID NO: 456 - RNA, 30 nt, synthetic construct; identical to SEQ ID NO: 454
  misc_feature 1..30: note = Synthetic: WV-47367
  misc_feature 1..30: note = Synthetic: ADR-0104231
  modified_base 1: mod_base = cm
  modified_base 1..2: mod_base = OTHER; note R-N-(1,3-dimethylimidazolidin-2-ylidene)phosphoramidate
  modified_base 2: mod_base = cm
  modified_base 2..3: mod_base = OTHER; note = S-phosphorothioate
  modified_base 3: mod_base = cm
  modified_base 3..4: mod_base = OTHER; note = S-phosphorothioate
  modified_base 4: mod_base = OTHER; note = 2-fluororibose adenine
  modified_base 4..5: mod_base = OTHER; note = S-phosphorothioate
  modified_base 5: mod_base = OTHER; note = 2-fluororibose guanine
  modified_base 5..6: mod_base = OTHER; note = S-phosphorothioate
  modified_base 6: mod_base = cm
  modified_base 7: mod_base = OTHER; note = 2-O-methylribose adenine
  modified_base 7..8: mod_base = OTHER; note = S-phosphorothioate
  modified_base 8: mod_base = OTHER; note = 2-fluororibose guanine
  modified_base 8..9: mod_base = OTHER; note = S-phosphorothioate
  modified_base 9: mod_base = OTHER; note = 2-fluororibose cytosine
  modified_base 10: mod_base = um
  modified_base 10..11: mod_base = OTHER; note = S-phosphorothioate
  modified_base 11: mod_base = OTHER; note = 2-fluororibose uracil
  modified_base 11..12: mod_base = OTHER; note R-N-(1,3-dimethylimidazolidin-2-ylidene)phosphoramidate
  modified_base 12: mod_base = cm
  modified_base 13: mod_base = OTHER; note = 2-fluororibose adenine
  modified_base 13..14: mod_base = OTHER; note = S-phosphorothioate
  modified_base 14: mod_base = OTHER; note = 2-fluororibose guanine
  modified_base 14..15: mod_base = OTHER; note R-N-(1,3-dimethylimidazolidin-2-ylidene)phosphoramidate
  modified_base 15: mod_base = OTHER; note = 2-fluororibose uracil
  modified_base 16: mod_base = cm
  modified_base 16..17: mod_base = OTHER; note = S-phosphorothioate
  modified_base 17: mod_base = OTHER; note = 2-fluororibose cytosine
  modified_base 17..18: mod_base = OTHER; note = S-phosphorothioate
  modified_base 18: mod_base = OTHER; note = 2-fluororibose cytosine
  modified_base 18..19: mod_base = OTHER; note = S-phosphorothioate
  modified_base 19: mod_base = OTHER; note = 2-fluororibose uracil
  modified_base 19..20: mod_base = OTHER; note = S-phosphorothioate
  modified_base 20: mod_base = um
  modified_base 21: mod_base = um
  modified_base 22: mod_base = OTHER; note = 2-fluororibose cytosine
  modified_base 22..23: mod_base = OTHER; note = S-phosphorothioate
  modified_base 23: mod_base = OTHER; note = deoxyribose 2-hydroxybenzimidazole
  modified_base 23..24: mod_base = OTHER; note = S-phosphorothioate
  modified_base 24: mod_base = OTHER; note = deoxyribose cytosine
  modified_base 24..25: mod_base = OTHER; note = S-phosphorothioate
  modified_base 25: mod_base = OTHER; note = deoxyribose inosine
  modified_base 25..26: mod_base = OTHER; note S-N-(1,3-dimethylimidazolidin-2-ylidene)phosphoramidate
  modified_base 26: mod_base = um
  modified_base 27: mod_base = OTHER; note = 2-fluororibose cytosine
  modified_base 27..28: mod_base = OTHER; note = S-phosphorothioate
  modified_base 28: mod_base = gm
  modified_base 28..29: mod_base = OTHER; note = S-phosphorothioate
  modified_base 29: mod_base = OTHER; note = 2-O-methylribose adenine
  modified_base 29..30: mod_base = OTHER; note R-N-(1,3-dimethylimidazolidin-2-ylidene)phosphoramidate
  modified_base 30: mod_base = um
  source 1..30: mol_type = other RNA

SEQ ID NO: 457 - RNA, 30 nt, synthetic construct; identical to SEQ ID NO: 80
  misc_feature 1..30: note = Synthetic: WV-47368
  misc_feature 1..30: note = Synthetic: ADR-0104219
  modified_base 1: mod_base = cm
  modified_base 1..2: mod_base = OTHER; note R-N-(1,3-dimethylimidazolidin-2-ylidene)phosphoramidate
  modified_base 2: mod_base = cm
  modified_base 2..3: mod_base = OTHER; note = S-phosphorothioate
  modified_base 3: mod_base = cm
  modified_base 3..4: mod_base = OTHER; note = S-phosphorothioate
  modified_base 4: mod_base = OTHER; note = 2-fluororibose adenine
  modified_base 4..5: mod_base = OTHER; note = S-phosphorothioate
  modified_base 5: mod_base = OTHER; note = 2-fluororibose guanine
  modified_base 5..6: mod_base = OTHER; note = S-phosphorothioate
  modified_base 6: mod_base = cm
  modified_base 7: mod_base = OTHER; note = 2-O-methylribose adenine
  modified_base 7..8: mod_base = OTHER; note = S-phosphorothioate
  modified_base 8: mod_base = OTHER; note = 2-fluororibose guanine
  modified_base 8..9: mod_base = OTHER; note = S-phosphorothioate
  modified_base 9: mod_base = OTHER; note = 2-fluororibose cytosine
  modified_base 10: mod_base = um
  modified_base 10..11: mod_base = OTHER; note = S-phosphorothioate
  modified_base 11: mod_base = OTHER; note = 2-fluororibose uracil
  modified_base 11..12: mod_base = OTHER; note R-N-(1,3-dimethylimidazolidin-2-ylidene)phosphoramidate
  modified_base 12: mod_base = cm
  modified_base 13: mod_base = OTHER; note = 2-fluororibose adenine
  modified_base 13..14: mod_base = OTHER; note = S-phosphorothioate
  modified_base 14: mod_base = OTHER; note = 2-fluororibose guanine
  modified_base 14..15: mod_base = OTHER; note R-N-(1,3-dimethylimidazolidin-2-ylidene)phosphoramidate
  modified_base 15: mod_base = OTHER; note = 2-fluororibose uracil
  modified_base 16: mod_base = cm
  modified_base 16..17: mod_base = OTHER; note = S-phosphorothioate
  modified_base 17: mod_base = OTHER; note = 2-fluororibose cytosine
  modified_base 17..18: mod_base = OTHER; note = S-phosphorothioate
  modified_base 18: mod_base = OTHER; note = 2-fluororibose cytosine
  modified_base 18..19: mod_base = OTHER; note = S-phosphorothioate
  modified_base 19: mod_base = OTHER; note = 2-fluororibose uracil
  modified_base 19..20: mod_base = OTHER; note = S-phosphorothioate
  modified_base 20: mod_base = um
  modified_base 21: mod_base = um
  modified_base 22: mod_base = OTHER; note = 2-fluororibose cytosine
  modified_base 22..23: mod_base = OTHER; note = S-phosphorothioate
  modified_base 23: mod_base = OTHER; note = deoxyribose uracil (position 3 connectivity)
  modified_base 23..24: mod_base = OTHER; note = S-phosphorothioate
  modified_base 24: mod_base = OTHER; note = deoxyribose cytosine
  modified_base 24..25: mod_base = OTHER; note = S-phosphorothioate
  modified_base 25: mod_base = OTHER; note = deoxyribose inosine
  modified_base 25..26: mod_base = OTHER; note S-N-(1,3-dimethylimidazolidin-2-ylidene)phosphoramidate
  modified_base 26: mod_base = um
  modified_base 27: mod_base = OTHER; note = 2-fluororibose cytosine
  modified_base 27..28: mod_base = OTHER; note = S-phosphorothioate
  modified_base 28: mod_base = gm
  modified_base 28..29: mod_base = OTHER; note = S-phosphorothioate
  modified_base 29: mod_base = OTHER; note = 2-O-methylribose adenine
  modified_base 29..30: mod_base = OTHER; note R-N-(1,3-dimethylimidazolidin-2-ylidene)phosphoramidate
  modified_base 30: mod_base = um
  source 1..30: mol_type = other RNA

SEQ ID NO: 458 - RNA, 30 nt, synthetic construct; identical to SEQ ID NO: 274
  misc_feature 1..30: note = Synthetic: WV-47369
  misc_feature 1..30: note = Synthetic: ADR-0104237
  modified_base 1: mod_base = cm
  modified_base 1..2: mod_base = OTHER; note R-N-(1,3-dimethylimidazolidin-2-ylidene)phosphoramidate
  modified_base 2: mod_base = cm
  modified_base 2..3: mod_base = OTHER; note = S-phosphorothioate
  modified_base 3: mod_base = cm
  modified_base 3..4: mod_base = OTHER; note = S-phosphorothioate
  modified_base 4: mod_base = OTHER; note = 2-fluororibose adenine
  modified_base 4..5: mod_base = OTHER; note = S-phosphorothioate
  modified_base 5: mod_base = OTHER; note = 2-fluororibose guanine
  modified_base 5..6: mod_base = OTHER; note = S-phosphorothioate
  modified_base 6: mod_base = cm
  modified_base 7: mod_base = OTHER; note = 2-O-methylribose adenine
  modified_base 7..8: mod_base = OTHER; note = S-phosphorothioate
  modified_base 8: mod_base = OTHER; note = 2-fluororibose guanine
  modified_base 8..9: mod_base = OTHER; note = S-phosphorothioate
  modified_base 9: mod_base = OTHER; note = 2-fluororibose cytosine
  modified_base 10: mod_base = um
  modified_base 10..11: mod_base = OTHER; note = S-phosphorothioate
  modified_base 11: mod_base = OTHER; note = 2-fluororibose uracil
  modified_base 11..12: mod_base = OTHER; note R-N-(1,3-dimethylimidazolidin-2-ylidene)phosphoramidate
  modified_base 12: mod_base = cm
  modified_base 13: mod_base = OTHER; note = 2-fluororibose adenine
  modified_base 13..14: mod_base = OTHER; note = S-phosphorothioate
  modified_base 14: mod_base = OTHER; note = 2-fluororibose guanine
  modified_base 14..15: mod_base = OTHER; note R-N-(1,3-dimethylimidazolidin-2-ylidene)phosphoramidate
  modified_base 15: mod_base = OTHER; note = 2-fluororibose uracil
  modified_base 16: mod_base = cm
  modified_base 16..17: mod_base = OTHER; note = S-phosphorothioate
  modified_base 17: mod_base = OTHER; note = 2-fluororibose cytosine
  modified_base 17..18: mod_base = OTHER; note = S-phosphorothioate
  modified_base 18: mod_base = OTHER; note = 2-fluororibose cytosine
  modified_base 18..19: mod_base = OTHER; note = S-phosphorothioate
  modified_base 19: mod_base = OTHER; note = 2-fluororibose uracil
  modified_base 19..20: mod_base = OTHER; note = S-phosphorothioate
  modified_base 20: mod_base = um
  modified_base 21: mod_base = um
  modified_base 22: mod_base = OTHER; note = 2-fluororibose cytosine
  modified_base 22..23: mod_base = OTHER; note = S-phosphorothioate
  modified_base 23: mod_base = OTHER; note = deoxyribose pseudoisocytidine, 5 connectivity
  modified_base 23..24: mod_base = OTHER; note = S-phosphorothioate
  modified_base 24: mod_base = OTHER; note = deoxyribose cytosine
  modified_base 24..25: mod_base = OTHER; note = S-phosphorothioate
  modified_base 25: mod_base = OTHER; note = deoxyribose inosine
  modified_base 25..26: mod_base = OTHER; note S-N-(1,3-dimethylimidazolidin-2-ylidene)phosphoramidate
  modified_base 26: mod_base = um
  modified_base 27: mod_base = OTHER; note = 2-fluororibose cytosine
  modified_base 27..28: mod_base = OTHER; note = S-phosphorothioate
  modified_base 28: mod_base = gm
  modified_base 28..29: mod_base = OTHER; note = S-phosphorothioate
  modified_base 29: mod_base = OTHER; note = 2-O-methylribose adenine
  modified_base 29..30: mod_base = OTHER; note R-N-(1,3-dimethylimidazolidin-2-ylidene)phosphoramidate
  modified_base 30: mod_base = um
  source 1..30: mol_type = other RNA

SEQ ID NO: 459 - RNA, 30 nt, synthetic construct; identical to SEQ ID NO: 274
  misc_feature 1..30: note = Synthetic: WV-47370
  misc_feature 1..30: note = Synthetic: ADR-0104227
  modified_base 1: mod_base = cm
  modified_base 1..2: mod_base = OTHER; note R-N-(1,3-dimethylimidazolidin-2-ylidene)phosphoramidate
  modified_base 2: mod_base = cm
  modified_base 2..3: mod_base = OTHER; note = S-phosphorothioate
  modified_base 3: mod_base = cm
  modified_base 3..4: mod_base = OTHER; note = S-phosphorothioate
  modified_base 4: mod_base = OTHER; note = 2-fluororibose adenine
  modified_base 4..5: mod_base = OTHER; note = S-phosphorothioate
  modified_base 5: mod_base = OTHER; note = 2-fluororibose guanine
  modified_base 5..6: mod_base = OTHER; note = S-phosphorothioate
  modified_base 6: mod_base = cm
  modified_base 7: mod_base = OTHER; note = 2-O-methylribose adenine
  modified_base 7..8: mod_base = OTHER; note = S-phosphorothioate
  modified_base 8: mod_base = OTHER; note = 2-fluororibose guanine
  modified_base 8..9: mod_base = OTHER; note = S-phosphorothioate
  modified_base 9: mod_base = OTHER; note = 2-fluororibose cytosine
  modified_base 10: mod_base = um
  modified_base 10..11: mod_base = OTHER; note = S-phosphorothioate
  modified_base 11: mod_base = OTHER; note = 2-fluororibose uracil
  modified_base 11..12: mod_base = OTHER; note R-N-(1,3-dimethylimidazolidin-2-ylidene)phosphoramidate
  modified_base 12: mod_base = cm
  modified_base 13: mod_base = OTHER; note = 2-fluororibose adenine
  modified_base 13..14: mod_base = OTHER; note = S-phosphorothioate
  modified_base 14: mod_base = OTHER; note = 2-fluororibose guanine
  modified_base 14..15: mod_base = OTHER; note R-N-(1,3-dimethylimidazolidin-2-ylidene)phosphoramidate
  modified_base 15: mod_base = OTHER; note = 2-fluororibose uracil
  modified_base 16: mod_base = cm
  modified_base 16..17: mod_base = OTHER; note = S-phosphorothioate
  modified_base 17: mod_base = OTHER; note = 2-fluororibose cytosine
  modified_base 17..18: mod_base = OTHER; note = S-phosphorothioate
  modified_base 18: mod_base = OTHER; note = 2-fluororibose cytosine
  modified_base 18..19: mod_base = OTHER; note = S-phosphorothioate
  modified_base 19: mod_base = OTHER; note = 2-fluororibose uracil
  modified_base 19..20: mod_base = OTHER; note = S-phosphorothioate
  modified_base 20: mod_base = um
  modified_base 21: mod_base = um
  modified_base 22: mod_base = OTHER; note = 2-fluororibose cytosine
  modified_base 22..23: mod_base = OTHER; note = S-phosphorothioate
  modified_base 23: mod_base = OTHER; note = deoxyribose 5-methylisocytosine
  modified_base 23..24: mod_base = OTHER; note = phosphorothioate
  modified_base 24: mod_base = OTHER; note = deoxyribose cytosine
  modified_base 24..25: mod_base = OTHER; note = S-phosphorothioate
  modified_base 25: mod_base = OTHER; note = deoxyribose inosine
  modified_base 25..26: mod_base = OTHER; note S-N-(1,3-dimethylimidazolidin-2-ylidene)phosphoramidate
  modified_base 26: mod_base = um
  modified_base 27: mod_base = OTHER; note = 2-fluororibose cytosine
  modified_base 27..28: mod_base = OTHER; note = S-phosphorothioate
  modified_base 28: mod_base = gm
  modified_base 28..29: mod_base = OTHER; note = S-phosphorothioate
  modified_base 29: mod_base = OTHER; note = 2-O-methylribose adenine
  modified_base 29..30: mod_base = OTHER; note R-N-(1,3-dimethylimidazolidin-2-ylidene)phosphoramidate
  modified_base 30: mod_base = um
  source 1..30: mol_type = other RNA

SEQ ID NO: 460 - RNA, 30 nt, synthetic construct; identical to SEQ ID NO: 80
  misc_feature 1..30: note = Synthetic: WV-47371
  misc_feature 1..30: note = Synthetic: ADR-0104127
  modified_base 1: mod_base = cm
  modified_base 1..2: mod_base = OTHER; note R-N-(1,3-dimethylimidazolidin-2-ylidene)phosphoramidate
  modified_base 2: mod_base = cm
  modified_base 2..3: mod_base = OTHER; note = S-phosphorothioate
  modified_base 3: mod_base = cm
  modified_base 3..4: mod_base = OTHER; note = S-phosphorothioate
  modified_base 4: mod_base = OTHER; note = 2-fluororibose adenine
  modified_base 4..5: mod_base = OTHER; note = S-phosphorothioate
  modified_base 5: mod_base = OTHER; note = 2-fluororibose guanine
  modified_base 5..6: mod_base = OTHER; note = S-phosphorothioate
  modified_base 6: mod_base = cm
  modified_base 7: mod_base = OTHER; note = 2-O-methylribose adenine
  modified_base 7..8: mod_base = OTHER; note = S-phosphorothioate
  modified_base 8: mod_base = OTHER; note = 2-fluororibose guanine
  modified_base 8..9: mod_base = OTHER; note = S-phosphorothioate
  modified_base 9: mod_base = OTHER; note = 2-fluororibose cytosine
  modified_base 10: mod_base = um
  modified_base 10..11: mod_base = OTHER; note = S-phosphorothioate
  modified_base 11: mod_base = OTHER; note = 2-fluororibose uracil
  modified_base 11..12: mod_base = OTHER; note R-N-(1,3-dimethylimidazolidin-2-ylidene)phosphoramidate
  modified_base 12: mod_base = cm
  modified_base 13: mod_base = OTHER; note = 2-fluororibose adenine
  modified_base 13..14: mod_base = OTHER; note = S-phosphorothioate
  modified_base 14: mod_base = OTHER; note = 2-fluororibose guanine
  modified_base 14..15: mod_base = OTHER; note R-N-(1,3-dimethylimidazolidin-2-ylidene)phosphoramidate
  modified_base 15: mod_base = OTHER; note = 2-fluororibose uracil
  modified_base 16: mod_base = cm
  modified_base 16..17: mod_base = OTHER; note = S-phosphorothioate
  modified_base 17: mod_base = OTHER; note = 2-fluororibose cytosine
  modified_base 17..18: mod_base = OTHER; note = S-phosphorothioate
  modified_base 18: mod_base = OTHER; note = 2-fluororibose cytosine
  modified_base 18..19: mod_base = OTHER; note = S-phosphorothioate
  modified_base 19: mod_base = OTHER; note = 2-fluororibose uracil
  modified_base 19..20: mod_base = OTHER; note = S-phosphorothioate
  modified_base 20: mod_base = um
  modified_base 21: mod_base = um
  modified_base 22: mod_base = OTHER; note = 2-fluororibose cytosine
  modified_base 22..23: mod_base = OTHER; note = S-phosphorothioate
  modified_base 23: mod_base = OTHER; note = S-propanetriol thymine
  modified_base 23..24: mod_base = OTHER; note = S-phosphorothioate
  modified_base 24: mod_base = OTHER; note = deoxyribose cytosine
  modified_base 24..25: mod_base = OTHER; note = S-phosphorothioate
  modified_base 25: mod_base = OTHER; note = deoxyribose inosine
  modified_base 25..26: mod_base = OTHER; note S-N-(1,3-dimethylimidazolidin-2-ylidene)phosphoramidate
  modified_base 26: mod_base = um
  modified_base 27: mod_base = OTHER; note = 2-fluororibose cytosine
  modified_base 27..28: mod_base = OTHER; note = S-phosphorothioate
  modified_base 28: mod_base = gm
  modified_base 28..29: mod_base = OTHER; note = S-phosphorothioate
  modified_base 29: mod_base = OTHER; note = 2-O-methylribose adenine
  modified_base 29..30: mod_base = OTHER; note R-N-(1,3-dimethylimidazolidin-2-ylidene)phosphoramidate
  modified_base 30: mod_base = um
  source 1..30: mol_type = other RNA

SEQ ID NO: 461 - RNA, 30 nt, synthetic construct; identical to SEQ ID NO: 80
  misc_feature 1..30: note = Synthetic: WV-47372
  misc_feature 1..30: note = Synthetic: ADR-0104125
  modified_base 1: mod_base = cm
  modified_base 1..2: mod_base = OTHER; note R-N-(1,3-dimethylimidazolidin-2-ylidene)phosphoramidate
  modified_base 2: mod_base = cm
  modified_base 2..3: mod_base = OTHER; note = S-phosphorothioate
  modified_base 3: mod_base = cm
  modified_base 3..4: mod_base = OTHER; note = S-phosphorothioate
  modified_base 4: mod_base = OTHER; note = 2-fluororibose adenine
  modified_base 4..5: mod_base = OTHER; note = S-phosphorothioate
  modified_base 5: mod_base = OTHER; note = 2-fluororibose guanine
  modified_base 5..6: mod_base = OTHER; note = S-phosphorothioate
  modified_base 6: mod_base = cm
  modified_base 7: mod_base = OTHER; note = 2-O-methylribose adenine
  modified_base 7..8: mod_base = OTHER; note = S-phosphorothioate
  modified_base 8: mod_base = OTHER; note = 2-fluororibose guanine
  modified_base 8..9: mod_base = OTHER; note = S-phosphorothioate
  modified_base 9: mod_base = OTHER; note = 2-fluororibose cytosine
  modified_base 10: mod_base = um
  modified_base 10..11: mod_base = OTHER; note = S-phosphorothioate
  modified_base 11: mod_base = OTHER; note = 2-fluororibose uracil
  modified_base 11..12: mod_base = OTHER; note R-N-(1,3-dimethylimidazolidin-2-ylidene)phosphoramidate
  modified_base 12: mod_base = cm
  modified_base 13: mod_base = OTHER; note = 2-fluororibose adenine
  modified_base 13..14: mod_base = OTHER; note = S-phosphorothioate
  modified_base 14: mod_base = OTHER; note = 2-fluororibose guanine
  modified_base 14..15: mod_base = OTHER; note R-N-(1,3-dimethylimidazolidin-2-ylidene)phosphoramidate
  modified_base 15: mod_base = OTHER; note = 2-fluororibose uracil
  modified_base 16: mod_base = cm
  modified_base 16..17: mod_base = OTHER; note = S-phosphorothioate
  modified_base 17: mod_base = OTHER; note = 2-fluororibose cytosine
  modified_base 17..18: mod_base = OTHER; note = S-phosphorothioate
  modified_base 18: mod_base = OTHER; note = 2-fluororibose cytosine
  modified_base 18..19: mod_base = OTHER; note = S-phosphorothioate
  modified_base 19: mod_base = OTHER; note = 2-fluororibose uracil
  modified_base 19..20: mod_base = OTHER; note = S-phosphorothioate
  modified_base 20: mod_base = um
  modified_base 21: mod_base = um
  modified_base 22: mod_base = OTHER; note = 2-fluororibose cytosine
  modified_base 22..23: mod_base = OTHER; note = S-phosphorothioate
  modified_base 23: mod_base = OTHER; note = R-propanetriol thymine
  modified_base 23..24: mod_base = OTHER; note = S-phosphorothioate
  modified_base 24: mod_base = OTHER; note = deoxyribose cytosine
  modified_base 24..25: mod_base = OTHER; note = S-phosphorothioate
  modified_base 25: mod_base = OTHER; note = deoxyribose inosine
  modified_base 25..26: mod_base = OTHER; note S-N-(1,3-dimethylimidazolidin-2-ylidene)phosphoramidate
  modified_base 26: mod_base = um
  modified_base 27: mod_base = OTHER; note = 2-fluororibose cytosine
  modified_base 27..28: mod_base = OTHER; note = S-phosphorothioate
  modified_base 28: mod_base = gm
  modified_base 28..29: mod_base = OTHER; note = S-phosphorothioate
  modified_base 29: mod_base = OTHER; note = 2-O-methylribose adenine
  modified_base 29..30: mod_base = OTHER; note R-N-(1,3-dimethylimidazolidin-2-ylidene)phosphoramidate
  modified_base 30: mod_base = um
  source 1..30: mol_type = other RNA

SEQ ID NO: 462 - RNA, 30 nt, synthetic construct; identical to SEQ ID NO: 274
  misc_feature 1..30: note = Synthetic: WV-47373
  misc_feature 1..30: note = Synthetic: ADR-0104235
  modified_base 1: mod_base = cm
  modified_base 1..2: mod_base = OTHER; note R-N-(1,3-dimethylimidazolidin-2-ylidene)phosphoramidate
  modified_base 2: mod_base = cm
  modified_base 2..3: mod_base = OTHER; note = S-phosphorothioate
  modified_base 3: mod_base = cm
  modified_base 3..4: mod_base = OTHER; note = S-phosphorothioate
  modified_base 4: mod_base = OTHER; note = 2-fluororibose adenine
  modified_base 4..5: mod_base = OTHER; note = S-phosphorothioate
  modified_base 5: mod_base = OTHER; note = 2-fluororibose guanine
  modified_base 5..6: mod_base = OTHER; note = S-phosphorothioate
  modified_base 6: mod_base = cm
  modified_base 7: mod_base = OTHER; note = 2-O-methylribose adenine
  modified_base 7..8: mod_base = OTHER; note = S-phosphorothioate
  modified_base 8: mod_base = OTHER; note = 2-fluororibose guanine
  modified_base 8..9: mod_base = OTHER; note = S-phosphorothioate
  modified_base 9: mod_base = OTHER; note = 2-fluororibose cytosine
  modified_base 10: mod_base = um
  modified_base 10..11: mod_base = OTHER; note = S-phosphorothioate
  modified_base 11: mod_base = OTHER; note = 2-fluororibose uracil
  modified_base 11..12: mod_base = OTHER; note R-N-(1,3-dimethylimidazolidin-2-ylidene)phosphoramidate
  modified_base 12: mod_base = cm
  modified_base 13: mod_base = OTHER; note = 2-fluororibose adenine
  modified_base 13..14: mod_base = OTHER; note = S-phosphorothioate
  modified_base 14: mod_base = OTHER; note = 2-fluororibose guanine
  modified_base 14..15: mod_base = OTHER; note R-N-(1,3-dimethylimidazolidin-2-ylidene)phosphoramidate
  modified_base 15: mod_base = OTHER; note = 2-fluororibose uracil
  modified_base 16: mod_base = cm
  modified_base 16..17: mod_base = OTHER; note = S-phosphorothioate
  modified_base 17: mod_base = OTHER; note = 2-fluororibose cytosine
  modified_base 17..18: mod_base = OTHER; note = S-phosphorothioate
  modified_base 18: mod_base = OTHER; note = 2-fluororibose cytosine
  modified_base 18..19: mod_base = OTHER; note = S-phosphorothioate
  modified_base 19: mod_base = OTHER; note = 2-fluororibose uracil
  modified_base 19..20: mod_base = OTHER; note = S-phosphorothioate
  modified_base 20: mod_base = um
  modified_base 21: mod_base = um
  modified_base 22: mod_base = OTHER; note = 2-fluororibose cytosine
  modified_base 22..23: mod_base = OTHER; note = S-phosphorothioate
  modified_base 23: mod_base = OTHER; note = deoxyribose N-[(phenylamino)carbonyl]-cytosine
  modified_base 23..24: mod_base = OTHER; note = S-phosphorothioate
  modified_base 24: mod_base = OTHER; note = deoxyribose cytosine
  modified_base 24..25: mod_base = OTHER; note = S-phosphorothioate
  modified_base 25: mod_base = OTHER; note = deoxyribose inosine
  modified_base 25..26: mod_base = OTHER; note S-N-(1,3-dimethylimidazolidin-2-ylidene)phosphoramidate
  modified_base 26: mod_base = um
  modified_base 27: mod_base = OTHER; note = 2-fluororibose cytosine
  modified_base 27..28: mod_base = OTHER; note = S-phosphorothioate
  modified_base 28: mod_base = gm
  modified_base 28..29: mod_base = OTHER; note = S-phosphorothioate
  modified_base 29: mod_base = OTHER; note = 2-O-methylribose adenine
  modified_base 29..30: mod_base = OTHER; note R-N-(1,3-dimethylimidazolidin-2-ylidene)phosphoramidate
  modified_base 30: mod_base = um
  source 1..30: mol_type = other RNA

SEQ ID NO: 463 - RNA, 30 nt, synthetic construct; identical to SEQ ID NO: 274
  misc_feature 1..30: note = Synthetic: WV-47374
  misc_feature 1..30: note = Synthetic: ADR-0104229
  modified_base 1: mod_base = cm
  modified_base 1..2: mod_base = OTHER; note R-N-(1,3-dimethylimidazolidin-2-ylidene)phosphoramidate
  modified_base 2: mod_base = cm
  modified_base 2..3: mod_base = OTHER; note = S-phosphorothioate
  modified_base 3: mod_base = cm
  modified_base 3..4: mod_base = OTHER; note = S-phosphorothioate
  modified_base 4: mod_base = OTHER; note = 2-fluororibose adenine
  modified_base 4..5: mod_base = OTHER; note = S-phosphorothioate
  modified_base 5: mod_base = OTHER; note = 2-fluororibose guanine
  modified_base 5..6: mod_base = OTHER; note = S-phosphorothioate
  modified_base 6: mod_base = cm
  modified_base 7: mod_base = OTHER; note = 2-O-methylribose adenine
  modified_base 7..8: mod_base = OTHER; note = S-phosphorothioate
  modified_base 8: mod_base = OTHER; note = 2-fluororibose guanine
  modified_base 8..9: mod_base = OTHER; note = S-phosphorothioate
  modified_base 9: mod_base = OTHER; note = 2-fluororibose cytosine
  modified_base 10: mod_base = um
  modified_base 10..11: mod_base = OTHER; note = S-phosphorothioate
  modified_base 11: mod_base = OTHER; note = 2-fluororibose uracil
  modified_base 11..12: mod_base = OTHER; note R-N-(1,3-dimethylimidazolidin-2-ylidene)phosphoramidate
  modified_base 12: mod_base = cm
  modified_base 13: mod_base = OTHER; note = 2-fluororibose adenine
  modified_base 13..14: mod_base = OTHER; note = S-phosphorothioate
  modified_base 14: mod_base = OTHER; note = 2-fluororibose guanine
  modified_base 14..15: mod_base = OTHER; note R-N-(1,3-dimethylimidazolidin-2-ylidene)phosphoramidate
  modified_base 15: mod_base = OTHER; note = 2-fluororibose uracil
  modified_base 16: mod_base = cm
  modified_base 16..17: mod_base = OTHER; note = S-phosphorothioate
  modified_base 17: mod_base = OTHER; note = 2-fluororibose cytosine
  modified_base 17..18: mod_base = OTHER; note = S-phosphorothioate
  modified_base 18: mod_base = OTHER; note = 2-fluororibose cytosine
  modified_base 18..19: mod_base = OTHER; note = S-phosphorothioate
  modified_base 19: mod_base = OTHER; note = 2-fluororibose uracil
  modified_base 19..20: mod_base = OTHER; note = S-phosphorothioate
  modified_base 20: mod_base = um
  modified_base 21: mod_base = um
  modified_base 22: mod_base = OTHER; note = 2-fluororibose cytosine
  modified_base 22..23: mod_base = OTHER; note = S-phosphorothioate
  modified_base 23: mod_base = OTHER; note = deoxyribose 4-N-naphthylcarbamoyl-cytidine
  modified_base 23..24: mod_base = OTHER; note = S-phosphorothioate
  modified_base 24: mod_base = OTHER; note = deoxyribose cytosine
  modified_base 24..25: mod_base = OTHER; note = S-phosphorothioate
  modified_base 25: mod_base = OTHER; note = deoxyribose inosine
  modified_base 25..26: mod_base = OTHER; note S-N-(1,3-dimethylimidazolidin-2-ylidene)phosphoramidate
  modified_base 26: mod_base = um
  modified_base 27: mod_base = OTHER; note = 2-fluororibose cytosine
  modified_base 27..28: mod_base = OTHER; note = S-phosphorothioate
  modified_base 28: mod_base = gm
  modified_base 28..29: mod_base = OTHER; note = S-phosphorothioate
  modified_base 29: mod_base = OTHER; note = 2-O-methylribose adenine
  modified_base 29..30: mod_base = OTHER; note R-N-(1,3-dimethylimidazolidin-2-ylidene)phosphoramidate
  modified_base 30: mod_base = um
  source 1..30: mol_type = other RNA

SEQ ID NO: 464 - RNA, 30 nt, synthetic construct; identical to SEQ ID NO: 274
  misc_feature 1..30: note = Synthetic: WV-47375
  misc_feature 1..30: note = Synthetic: ADR-0104123
  modified_base 1: mod_base = cm
  modified_base 1..2: mod_base = OTHER; note R-N-(1,3-dimethylimidazolidin-2-ylidene)phosphoramidate
  modified_base 2: mod_base = cm
  modified_base 2..3: mod_base = OTHER; note = S-phosphorothioate
  modified_base 3: mod_base = cm
  modified_base 3..4: mod_base = OTHER; note = S-phosphorothioate
  modified_base 4: mod_base = OTHER; note = 2-fluororibose adenine
  modified_base 4..5: mod_base = OTHER; note = S-phosphorothioate
  modified_base 5: mod_base = OTHER; note = 2-fluororibose guanine
  modified_base 5..6: mod_base = OTHER; note = S-phosphorothioate
  modified_base 6: mod_base = cm
  modified_base 7: mod_base = OTHER; note = 2-O-methylribose adenine
  modified_base 7..8: mod_base = OTHER; note = S-phosphorothioate
  modified_base 8: mod_base = OTHER; note = 2-fluororibose guanine
  modified_base 8..9: mod_base = OTHER; note = S-phosphorothioate
  modified_base 9: mod_base = OTHER; note = 2-fluororibose cytosine
  modified_base 10: mod_base = um
  modified_base 10..11: mod_base = OTHER; note = S-phosphorothioate
  modified_base 11: mod_base = OTHER; note = 2-fluororibose uracil
  modified_base 11..12: mod_base = OTHER; note R-N-(1,3-dimethylimidazolidin-2-ylidene)phosphoramidate
  modified_base 12: mod_base = cm
  modified_base 13: mod_base = OTHER; note = 2-fluororibose adenine
  modified_base 13..14: mod_base = OTHER; note = S-phosphorothioate
  modified_base 14: mod_base = OTHER; note = 2-fluororibose guanine
  modified_base 14..15: mod_base = OTHER; note R-N-(1,3-dimethylimidazolidin-2-ylidene)phosphoramidate
  modified_base 15: mod_base = OTHER; note = 2-fluororibose uracil
  modified_base 16: mod_base = cm
  modified_base 16..17: mod_base = OTHER; note = S-phosphorothioate
  modified_base 17: mod_base = OTHER; note = 2-fluororibose cytosine
  modified_base 17..18: mod_base = OTHER; note = S-phosphorothioate
  modified_base 18: mod_base = OTHER; note = 2-fluororibose cytosine
  modified_base 18..19: mod_base = OTHER; note = S-phosphorothioate
  modified_base 19: mod_base = OTHER; note = 2-fluororibose uracil
  modified_base 19..20: mod_base = OTHER; note = S-phosphorothioate
  modified_base 20: mod_base = um
  modified_base 21: mod_base = um
  modified_base 22: mod_base = OTHER; note = 2-fluororibose cytosine
  modified_base 22..23: mod_base = OTHER; note = S-phosphorothioate
  modified_base 23: mod_base = OTHER; note = alpha-threofuranosyl (3-2 connectivity) cytosine
  modified_base 23..24: mod_base = OTHER; note = S-phosphorothioate
  modified_base 24: mod_base = OTHER; note = deoxyribose cytosine
  modified_base 24..25: mod_base = OTHER; note = S-phosphorothioate
  modified_base 25: mod_base = OTHER; note = deoxyribose inosine
  modified_base 25..26: mod_base = OTHER; note S-N-(1,3-dimethylimidazolidin-2-ylidene)phosphoramidate
  modified_base 26: mod_base = um
  modified_base 27: mod_base = OTHER; note = 2-fluororibose cytosine
  modified_base 27..28: mod_base = OTHER; note = S-phosphorothioate
  modified_base 28: mod_base = gm
  modified_base 28..29: mod_base = OTHER; note = S-phosphorothioate
  modified_base 29: mod_base = OTHER; note = 2-O-methylribose adenine
  modified_base 29..30: mod_base = OTHER; note R-N-(1,3-dimethylimidazolidin-2-ylidene)phosphoramidate
  modified_base 30: mod_base = um
  source 1..30: mol_type = other RNA

SEQ ID NO: 465 - RNA, 30 nt, synthetic construct; identical to SEQ ID NO: 273
  misc_feature 1..30: note = Synthetic: WV-46461
  misc_feature 1..30: note = Synthetic: ADR-0104170
  modified_base 1: mod_base = cm
  modified_base 1..2: mod_base = OTHER; note R-N-(1,3-dimethylimidazolidin-2-ylidene)phosphoramidate
  modified_base 2: mod_base = cm
  modified_base 2..3: mod_base = OTHER; note = S-phosphorothioate
  modified_base 3: mod_base = cm
  modified_base 3..4: mod_base = OTHER; note = S-phosphorothioate
  modified_base 4: mod_base = OTHER; note = 2-fluororibose adenine
  modified_base 4..5: mod_base = OTHER; note = S-phosphorothioate
  modified_base 5: mod_base = OTHER; note = 2-fluororibose guanine
  modified_base 5..6: mod_base = OTHER; note = S-phosphorothioate
  modified_base 6: mod_base = cm
  modified_base 7: mod_base = OTHER; note = 2-O-methylribose adenine
  modified_base 7..8: mod_base = OTHER; note = S-phosphorothioate
  modified_base 8: mod_base = OTHER; note = 2-fluororibose guanine
  modified_base 8..9: mod_base = OTHER; note = S-phosphorothioate
  modified_base 9: mod_base = OTHER; note = 2-fluororibose cytosine
  modified_base 10: mod_base = um
  modified_base 10..11: mod_base = OTHER; note = S-phosphorothioate
  modified_base 11: mod_base = OTHER; note = 2-fluororibose uracil
  modified_base 11..12: mod_base = OTHER; note R-N-(1,3-dimethylimidazolidin-2-ylidene)phosphoramidate
  modified_base 12: mod_base = cm
  modified_base 13: mod_base = OTHER; note = 2-fluororibose adenine
  modified_base 13..14: mod_base = OTHER; note = S-phosphorothioate
  modified_base 14: mod_base = OTHER; note = 2-fluororibose guanine
  modified_base 14..15: mod_base = OTHER; note R-N-(1,3-dimethylimidazolidin-2-ylidene)phosphoramidate
  modified_base 15: mod_base = OTHER; note = 2-fluororibose uracil
  modified_base 16: mod_base = cm
  modified_base 16..17: mod_base = OTHER; note = S-phosphorothioate
  modified_base 17: mod_base = OTHER; note = 2-fluororibose cytosine
  modified_base 17..18: mod_base = OTHER; note = S-phosphorothioate
  modified_base 18: mod_base = OTHER; note = 2-fluororibose cytosine
  modified_base 18..19: mod_base = OTHER; note = S-phosphorothioate
  modified_base 19: mod_base = OTHER; note = 2-fluororibose uracil
  modified_base 19..20: mod_base = OTHER; note = S-phosphorothioate
  modified_base 20: mod_base = um
  modified_base 21: mod_base = um
  modified_base 22: mod_base = OTHER; note = 2-fluororibose cytosine
  modified_base 22..23: mod_base = OTHER; note = S-phosphorothioate
  modified_base 23: mod_base = OTHER; note = deoxyribose thymine
  modified_base 23..24: mod_base = OTHER; note = S-phosphorothioate
  modified_base 24: mod_base = OTHER; note = deoxyribose uracil (position 3 connectivity)
  modified_base 24..25: mod_base = OTHER; note = S-phosphorothioate
  modified_base 25: mod_base = OTHER; note = deoxyribose inosine
  modified_base 25..26: mod_base = OTHER; note R-N-(1,3-dimethylimidazolidin-2-ylidene)phosphoramidate
  modified_base 26: mod_base = um
  modified_base 27: mod_base = OTHER; note = 2-fluororibose cytosine
  modified_base 27..28: mod_base = OTHER; note = S-phosphorothioate
  modified_base 28: mod_base = gm
  modified_base 28..29: mod_base = OTHER; note = S-phosphorothioate
  modified_base 29: mod_base = OTHER; note = 2-O-methylribose adenine
  modified_base 29..30: mod_base = OTHER; note R-N-(1,3-dimethylimidazolidin-2-ylidene)phosphoramidate
  modified_base 30: mod_base = um
  source 1..30: mol_type = other RNA

SEQ ID NO: 466 - RNA, 30 nt, synthetic construct; identical to SEQ ID NO: 273
  misc_feature 1..30: note = Synthetic: WV-47376
  misc_feature 1..30: note = Synthetic: ADR-0104168
  modified_base 1: mod_base = cm
  modified_base 1..2: mod_base = OTHER; note R-N-(1,3-dimethylimidazolidin-2-ylidene)phosphoramidate
  modified_base 2: mod_base = cm
  modified_base 2..3: mod_base = OTHER; note = S-phosphorothioate
  modified_base 3: mod_base = cm
  modified_base 3..4: mod_base = OTHER; note = S-phosphorothioate
  modified_base 4: mod_base = OTHER; note = 2-fluororibose adenine
  modified_base 4..5: mod_base = OTHER; note = S-phosphorothioate
  modified_base 5: mod_base = OTHER; note = 2-fluororibose guanine
  modified_base 5..6: mod_base = OTHER; note = S-phosphorothioate
  modified_base 6: mod_base = cm
  modified_base 7: mod_base = OTHER; note = 2-O-methylribose adenine
  modified_base 7..8: mod_base = OTHER; note = S-phosphorothioate
  modified_base 8: mod_base = OTHER; note = 2-fluororibose guanine
  modified_base 8..9: mod_base = OTHER; note = S-phosphorothioate
  modified_base 9: mod_base = OTHER; note = 2-fluororibose cytosine
  modified_base 10: mod_base = um
  modified_base 10..11: mod_base = OTHER; note = S-phosphorothioate
  modified_base 11: mod_base = OTHER; note = 2-fluororibose uracil
  modified_base 11..12: mod_base = OTHER; note R-N-(1,3-dimethylimidazolidin-2-ylidene)phosphoramidate
  modified_base 12: mod_base = cm
  modified_base 13: mod_base = OTHER; note = 2-fluororibose adenine
  modified_base 13..14: mod_base = OTHER; note = S-phosphorothioate
  modified_base 14: mod_base = OTHER; note = 2-fluororibose guanine
  modified_base 14..15: mod_base = OTHER; note R-N-(1,3-dimethylimidazolidin-2-ylidene)phosphoramidate
  modified_base 15: mod_base = OTHER; note = 2-fluororibose uracil
  modified_base 16: mod_base = cm
  modified_base 16..17: mod_base = OTHER; note = S-phosphorothioate
  modified_base 17: mod_base = OTHER; note = 2-fluororibose cytosine
  modified_base 17..18: mod_base = OTHER; note = S-phosphorothioate
  modified_base 18: mod_base = OTHER; note = 2-fluororibose cytosine
  modified_base 18..19: mod_base = OTHER; note = S-phosphorothioate
  modified_base 19: mod_base = OTHER; note = 2-fluororibose uracil
  modified_base 19..20: mod_base = OTHER; note = S-phosphorothioate
  modified_base 20: mod_base = um
  modified_base 21: mod_base = um
  modified_base 22: mod_base = OTHER; note = 2-fluororibose cytosine
  modified_base 22..23: mod_base = OTHER; note = S-phosphorothioate
  modified_base 23: mod_base = OTHER; note = deoxyribose thymine
  modified_base 23..24: mod_base = OTHER; note = S-phosphorothioate
  modified_base 24: mod_base = OTHER; note = deoxyribose uracil (position 3 connectivity)
  modified_base 24..25: mod_base = OTHER; note = S-phosphorothioate
  modified_base 25: mod_base = OTHER; note = 2,4-locked-ribose inosine
  modified_base 25..26: mod_base = OTHER; note = S-phosphorothioate
  modified_base 26: mod_base = um
  modified_base 27: mod_base = OTHER; note = 2-fluororibose cytosine
  modified_base 27..28: mod_base = OTHER; note = S-phosphorothioate
  modified_base 28: mod_base = gm
  modified_base 28..29: mod_base = OTHER; note = S-phosphorothioate
  modified_base 29: mod_base = OTHER; note = 2-O-methylribose adenine
  modified_base 29..30: mod_base = OTHER; note R-N-(1,3-dimethylimidazolidin-2-ylidene)phosphoramidate
  modified_base 30: mod_base = um
  source 1..30: mol_type = other RNA

SEQ ID NO: 467 - RNA, 30 nt, synthetic construct
  misc_feature 1..30: note = Synthetic: WV-47377
  misc_feature 1..30: note = Synthetic: ADR-0104197
  modified_base 1: mod_base = cm
  modified_base 1..2: mod_base = OTHER; note R-N-(1,3-dimethylimidazolidin-2-ylidene)phosphoramidate
  modified_base 2: mod_base = cm
  modified_base 2..3: mod_base = OTHER; note = S-phosphorothioate
  modified_base 3: mod_base = cm
  modified_base 3..4: mod_base = OTHER; note = S-phosphorothioate
  modified_base 4: mod_base = OTHER; note = 2-fluororibose adenine
  modified_base 4..5: mod_base = OTHER; note = S-phosphorothioate
  modified_base 5: mod_base = OTHER; note = 2-fluororibose guanine
  modified_base 5..6: mod_base = OTHER; note = S-phosphorothioate
  modified_base 6: mod_base = cm
  modified_base 7: mod_base = OTHER; note = 2-O-methylribose adenine
  modified_base 7..8: mod_base = OTHER; note = S-phosphorothioate
  modified_base 8: mod_base = OTHER; note = 2-fluororibose guanine
  modified_base 8..9: mod_base = OTHER; note = S-phosphorothioate
  modified_base 9: mod_base = OTHER; note = 2-fluororibose cytosine
  modified_base 10: mod_base = um
  modified_base 10..11: mod_base = OTHER; note = S-phosphorothioate
  modified_base 11: mod_base = OTHER; note = 2-fluororibose uracil
  modified_base 11..12: mod_base = OTHER; note R-N-(1,3-dimethylimidazolidin-2-ylidene)phosphoramidate
  modified_base 12: mod_base = cm
  modified_base 13: mod_base = OTHER; note = 2-fluororibose adenine
  modified_base 13..14: mod_base = OTHER; note = S-phosphorothioate
  modified_base 14: mod_base = OTHER; note = 2-fluororibose guanine
  modified_base 14..15: mod_base = OTHER; note R-N-(1,3-dimethylimidazolidin-2-ylidene)phosphoramidate
  modified_base 15: mod_base = OTHER; note = 2-fluororibose uracil
  modified_base 16: mod_base = cm
  modified_base 16..17: mod_base = OTHER; note = S-phosphorothioate
  modified_base 17: mod_base = OTHER; note = 2-fluororibose cytosine
  modified_base 17..18: mod_base = OTHER; note = S-phosphorothioate
  modified_base 18: mod_base = OTHER; note = 2-fluororibose cytosine
  modified_base 18..19: mod_base = OTHER; note = S-phosphorothioate
  modified_base 19: mod_base = OTHER; note = 2-fluororibose uracil
  modified_base 19..20: mod_base = OTHER; note = S-phosphorothioate
  modified_base 20: mod_base = um
  modified_base 21: mod_base = um
  modified_base 22: mod_base = OTHER; note = 2-fluororibose cytosine
  modified_base 22..23: mod_base = OTHER; note = S-phosphorothioate
  modified_base 23: mod_base = OTHER; note = deoxyribose thymine
  modified_base 23..24: mod_base = OTHER; note = S-phosphorothioate
  modified_base 24: mod_base = OTHER; note = deoxyribose uracil (position 3 connectivity)
  modified_base 24..25: mod_base = OTHER; note = S-phosphorothioate
  modified_base 25: mod_base = OTHER; note = deoxyribose 6-amino-9-substituted 8,9-dihydro-7H-purin-8-one
  modified_base 25..26: mod_base = OTHER; note R-N-(1,3-dimethylimidazolidin-2-ylidene)phosphoramidate
  modified_base 26: mod_base = um
  modified_base 27: mod_base = OTHER; note = 2-fluororibose cytosine
  modified_base 27..28: mod_base = OTHER; note = S-phosphorothioate
  modified_base 28: mod_base = gm
  modified_base 28..29: mod_base = OTHER; note = S-phosphorothioate
  modified_base 29: mod_base = OTHER; note = 2-O-methylribose adenine
  modified_base 29..30: mod_base = OTHER; note R-N-(1,3-dimethylimidazolidin-2-ylidene)phosphoramidate
  modified_base 30: mod_base = um
  source 1..30: mol_type = other RNA
cccagcagcttcagtccctttcttatcgat

SEQ ID NO: 468 - RNA, 30 nt, synthetic construct; identical to SEQ ID NO: 467
  misc_feature 1..30: note = Synthetic: WV-47378
  misc_feature 1..30: note = Synthetic: ADR-0104192
  modified_base 1: mod_base = cm
  modified_base 1..2: mod_base = OTHER; note R-N-(1,3-dimethylimidazolidin-2-ylidene)phosphoramidate
  modified_base 2: mod_base = cm
  modified_base 2..3: mod_base = OTHER; note = S-phosphorothioate
  modified_base 3: mod_base = cm
  modified_base 3..4: mod_base = OTHER; note = S-phosphorothioate
  modified_base 4: mod_base = OTHER; note = 2-fluororibose adenine
  modified_base 4..5: mod_base = OTHER; note = S-phosphorothioate
  modified_base 5: mod_base = OTHER; note = 2-fluororibose guanine
  modified_base 5..6: mod_base = OTHER; note = S-phosphorothioate
  modified_base 6: mod_base = cm
  modified_base 7: mod_base = OTHER; note = 2-O-methylribose adenine
  modified_base 7..8: mod_base = OTHER; note = S-phosphorothioate
  modified_base 8: mod_base = OTHER; note = 2-fluororibose guanine
  modified_base 8..9: mod_base = OTHER; note = S-phosphorothioate
  modified_base 9: mod_base = OTHER; note = 2-fluororibose cytosine
  modified_base 10: mod_base = um
  modified_base 10..11: mod_base = OTHER; note = S-phosphorothioate
  modified_base 11: mod_base = OTHER; note = 2-fluororibose uracil
  modified_base 11..12: mod_base = OTHER; note R-N-(1,3-dimethylimidazolidin-2-ylidene)phosphoramidate
  modified_base 12: mod_base = cm
  modified_base 13: mod_base = OTHER; note = 2-fluororibose adenine
  modified_base 13..14: mod_base = OTHER; note = S-phosphorothioate
  modified_base 14: mod_base = OTHER; note = 2-fluororibose guanine
  modified_base 14..15: mod_base = OTHER; note R-N-(1,3-dimethylimidazolidin-2-ylidene)phosphoramidate
  modified_base 15: mod_base = OTHER; note = 2-fluororibose uracil
  modified_base 16: mod_base = cm
  modified_base 16..17: mod_base = OTHER; note = S-phosphorothioate
  modified_base 17: mod_base = OTHER; note = 2-fluororibose cytosine
  modified_base 17..18: mod_base = OTHER; note = S-phosphorothioate
  modified_base 18: mod_base = OTHER; note = 2-fluororibose cytosine
  modified_base 18..19: mod_base = OTHER; note = S-phosphorothioate
  modified_base 19: mod_base = OTHER; note = 2-fluororibose uracil
  modified_base 19..20: mod_base = OTHER; note = S-phosphorothioate
  modified_base 20: mod_base = um
  modified_base 21: mod_base = um
  modified_base 22: mod_base = OTHER; note = 2-fluororibose cytosine
  modified_base 22..23: mod_base = OTHER; note = S-phosphorothioate
  modified_base 23: mod_base = OTHER; note = deoxyribose thymine
  modified_base 23..24: mod_base = OTHER; note = S-phosphorothioate
  modified_base 24: mod_base = OTHER; note = deoxyribose uracil (position 3 connectivity)
  modified_base 24..25: mod_base = OTHER; note = S-phosphorothioate
  modified_base 25: mod_base = OTHER; note = deoxyribose 6-deamino-oxo-adenine
  modified_base 25..26: mod_base = OTHER; note R-N-(1,3-dimethylimidazolidin-2-ylidene)phosphoramidate
  modified_base 26: mod_base = um
  modified_base 27: mod_base = OTHER; note = 2-fluororibose cytosine
  modified_base 27..28: mod_base = OTHER; note = S-phosphorothioate
  modified_base 28: mod_base = gm
  modified_base 28..29: mod_base = OTHER; note = S-phosphorothioate
  modified_base 29: mod_base = OTHER; note = 2-O-methylribose adenine
  modified_base 29..30: mod_base = OTHER; note R-N-(1,3-dimethylimidazolidin-2-ylidene)phosphoramidate
  modified_base 30: mod_base = um
  source 1..30: mol_type = other RNA

SEQ ID NO: 469 - RNA, 30 nt, synthetic construct; identical to SEQ ID NO: 467
  misc_feature 1..30: note = Synthetic: WV-47379
  misc_feature 1..30: note = Synthetic: ADR-0104196
  modified_base 1: mod_base = cm
  modified_base 1..2: mod_base = OTHER; note R-N-(1,3-dimethylimidazolidin-2-ylidene)phosphoramidate
  modified_base 2: mod_base = cm
  modified_base 2..3: mod_base = OTHER; note = S-phosphorothioate
  modified_base 3: mod_base = cm
  modified_base 3..4: mod_base = OTHER; note = S-phosphorothioate
  modified_base 4: mod_base = OTHER; note = 2-fluororibose adenine
  modified_base 4..5: mod_base = OTHER; note = S-phosphorothioate
  modified_base 5: mod_base = OTHER; note = 2-fluororibose guanine
  modified_base 5..6: mod_base = OTHER; note = S-phosphorothioate
  modified_base 6: mod_base = cm
  modified_base 7: mod_base = OTHER; note = 2-O-methylribose adenine
  modified_base 7..8: mod_base = OTHER; note = S-phosphorothioate
  modified_base 8: mod_base = OTHER; note = 2-fluororibose guanine
  modified_base 8..9: mod_base = OTHER; note = S-phosphorothioate
  modified_base 9: mod_base = OTHER; note = 2-fluororibose cytosine
  modified_base 10: mod_base = um
  modified_base 10..11: mod_base = OTHER; note = S-phosphorothioate
  modified_base 11: mod_base = OTHER; note = 2-fluororibose uracil
  modified_base 11..12: mod_base = OTHER; note R-N-(1,3-dimethylimidazolidin-2-ylidene)phosphoramidate
  modified_base 12: mod_base = cm
  modified_base 13: mod_base = OTHER; note = 2-fluororibose adenine
  modified_base 13..14: mod_base = OTHER; note = S-phosphorothioate
  modified_base 14: mod_base = OTHER; note = 2-fluororibose guanine
  modified_base 14..15: mod_base = OTHER; note R-N-(1,3-dimethylimidazolidin-2-ylidene)phosphoramidate
  modified_base 15: mod_base = OTHER; note = 2-fluororibose uracil
  modified_base 16: mod_base = cm
  modified_base 16..17: mod_base = OTHER; note = S-phosphorothioate
  modified_base 17: mod_base = OTHER; note = 2-fluororibose cytosine
  modified_base 17..18: mod_base = OTHER; note = S-phosphorothioate
  modified_base 18: mod_base = OTHER; note = 2-fluororibose cytosine
  modified_base 18..19: mod_base = OTHER; note = S-phosphorothioate
  modified_base 19: mod_base = OTHER; note = 2-fluororibose uracil
  modified_base 19..20: mod_base = OTHER; note = S-phosphorothioate
  modified_base 20: mod_base = um
  modified_base 21: mod_base = um
  modified_base 22: mod_base = OTHER; note = 2-fluororibose cytosine
  modified_base 22..23: mod_base = OTHER; note = S-phosphorothioate
  modified_base 23: mod_base = OTHER; note = deoxyribose thymine
  modified_base 23..24: mod_base = OTHER; note = S-phosphorothioate
  modified_base 24: mod_base = OTHER; note = deoxyribose uracil (position 3 connectivity)
  modified_base 24..25: mod_base = OTHER; note = S-phosphorothioate
  modified_base 25: mod_base = OTHER; note = deoxyribose 2-hydroxybenzimidazole
  modified_base 25..26: mod_base = OTHER; note = S-phosphorothioate
  modified_base 26: mod_base = um
  modified_base 27: mod_base = OTHER; note = 2-fluororibose cytosine
  modified_base 27..28: mod_base = OTHER; note = S-phosphorothioate
  modified_base 28: mod_base = gm
  modified_base 28..29: mod_base = OTHER; note = S-phosphorothioate
  modified_base 29: mod_base = OTHER; note = 2-O-methylribose adenine
  modified_base 29..30: mod_base = OTHER; note R-N-(1,3-dimethylimidazolidin-2-ylidene)phosphoramidate
  modified_base 30: mod_base = um
  source 1..30: mol_type = other RNA

SEQ ID NO: 470 - RNA, 30 nt, synthetic construct
  misc_feature 1..30: note = Synthetic: WV-47380
  misc_feature 1..30: note = Synthetic: ADR-0104169
  modified_base 1: mod_base = cm
  modified_base 1..2: mod_base = OTHER; note R-N-(1,3-dimethylimidazolidin-2-ylidene)phosphoramidate
  modified_base 2: mod_base = cm
  modified_base 2..3: mod_base = OTHER; note = S-phosphorothioate
  modified_base 3: mod_base = cm
  modified_base 3..4: mod_base = OTHER; note = S-phosphorothioate
  modified_base 4: mod_base = OTHER; note = 2-fluororibose adenine
  modified_base 4..5: mod_base = OTHER; note = S-phosphorothioate
  modified_base 5: mod_base = OTHER; note = 2-fluororibose guanine
  modified_base 5..6: mod_base = OTHER; note = S-phosphorothioate
  modified_base 6: mod_base = cm
  modified_base 7: mod_base = OTHER; note = 2-O-methylribose adenine
  modified_base 7..8: mod_base = OTHER; note = S-phosphorothioate
  modified_base 8: mod_base = OTHER; note = 2-fluororibose guanine
  modified_base 8..9: mod_base = OTHER; note = S-phosphorothioate
  modified_base 9: mod_base = OTHER; note = 2-fluororibose cytosine
  modified_base 10: mod_base = um
  modified_base 10..11: mod_base = OTHER; note = S-phosphorothioate
  modified_base 11: mod_base = OTHER; note = 2-fluororibose uracil
  modified_base 11..12: mod_base = OTHER; note R-N-(1,3-dimethylimidazolidin-2-ylidene)phosphoramidate
  modified_base 12: mod_base = cm
  modified_base 13: mod_base = OTHER; note = 2-fluororibose adenine
  modified_base 13..14: mod_base = OTHER; note = S-phosphorothioate
  modified_base 14: mod_base = OTHER; note = 2-fluororibose guanine
  modified_base 14..15: mod_base = OTHER; note R-N-(1,3-dimethylimidazolidin-2-ylidene)phosphoramidate
  modified_base 15: mod_base = OTHER; note = 2-fluororibose uracil
  modified_base 16: mod_base = cm
  modified_base 16..17: mod_base = OTHER; note = S-phosphorothioate
  modified_base 17: mod_base = OTHER; note = 2-fluororibose cytosine
  modified_base 17..18: mod_base = OTHER; note = S-phosphorothioate
  modified_base 18: mod_base = OTHER; note = 2-fluororibose cytosine
  modified_base 18..19: mod_base = OTHER; note = S-phosphorothioate
  modified_base 19: mod_base = OTHER; note = 2-fluororibose uracil
  modified_base 19..20: mod_base = OTHER; note = S-phosphorothioate
  modified_base 20: mod_base = um
  modified_base 21: mod_base = um
  modified_base 22: mod_base = OTHER; note = 2-fluororibose cytosine
  modified_base 22..23: mod_base = OTHER; note = S-phosphorothioate
  modified_base 23: mod_base = OTHER; note = deoxyribose thymine
  modified_base 23..24: mod_base = OTHER; note = S-phosphorothioate
  modified_base 24: mod_base = OTHER; note = deoxyribose uracil (position 3 connectivity)
  modified_base 24..25: mod_base = OTHER; note = S-phosphorothioate
  modified_base 25: mod_base = OTHER; note = deoxyribose uracil (position 3 connectivity)
  modified_base 25..26: mod_base = OTHER; note R-N-(1,3-dimethylimidazolidin-2-ylidene)phosphoramidate
  modified_base 26: mod_base = um
  modified_base 27: mod_base = OTHER; note = 2-fluororibose cytosine
  modified_base 27..28: mod_base = OTHER; note = S-phosphorothioate
  modified_base 28: mod_base = gm
  modified_base 28..29: mod_base = OTHER; note = S-phosphorothioate
  modified_base 29: mod_base = OTHER; note = 2-O-methylribose adenine
  modified_base 29..30: mod_base = OTHER; note R-N-(1,3-dimethylimidazolidin-2-ylidene)phosphoramidate
  modified_base 30: mod_base = um
  source 1..30: mol_type = other RNA
cccagcagcttcagtccctttcttttcgat

SEQ ID NO: 471 - RNA, 30 nt, synthetic construct
  misc_feature 1..30: note = Synthetic: WV-47381
  misc_feature 1..30: note = Synthetic: ADR-0104199
  modified_base 1: mod_base = cm
  modified_base 1..2: mod_base = OTHER; note R-N-(1,3-dimethylimidazolidin-2-ylidene)phosphoramidate
  modified_base 2: mod_base = cm
  modified_base 2..3: mod_base = OTHER; note = S-phosphorothioate
  modified_base 3: mod_base = cm
  modified_base 3..4: mod_base = OTHER; note = S-phosphorothioate
  modified_base 4: mod_base = OTHER; note = 2-fluororibose adenine
  modified_base 4..5: mod_base = OTHER; note = S-phosphorothioate
  modified_base 5: mod_base = OTHER; note = 2-fluororibose guanine
  modified_base 5..6: mod_base = OTHER; note = S-phosphorothioate
  modified_base 6: mod_base = cm
  modified_base 7: mod_base = OTHER; note = 2-O-methylribose adenine
  modified_base 7..8: mod_base = OTHER; note = S-phosphorothioate
  modified_base 8: mod_base = OTHER; note = 2-fluororibose guanine
  modified_base 8..9: mod_base = OTHER; note = S-phosphorothioate
  modified_base 9: mod_base = OTHER; note = 2-fluororibose cytosine
  modified_base 10: mod_base = um
  modified_base 10..11: mod_base = OTHER; note = S-phosphorothioate
  modified_base 11: mod_base = OTHER; note = 2-fluororibose uracil
  modified_base 11..12: mod_base = OTHER; note R-N-(1,3-dimethylimidazolidin-2-ylidene)phosphoramidate
  modified_base 12: mod_base = cm
  modified_base 13: mod_base = OTHER; note = 2-fluororibose adenine
  modified_base 13..14: mod_base = OTHER; note = S-phosphorothioate
  modified_base 14: mod_base = OTHER; note = 2-fluororibose guanine
  modified_base 14..15: mod_base = OTHER; note R-N-(1,3-dimethylimidazolidin-2-ylidene)phosphoramidate
  modified_base 15: mod_base = OTHER; note = 2-fluororibose uracil
  modified_base 16: mod_base = cm
  modified_base 16..17: mod_base = OTHER; note = S-phosphorothioate
  modified_base 17: mod_base = OTHER; note = 2-fluororibose cytosine
  modified_base 17..18: mod_base = OTHER; note = S-phosphorothioate
  modified_base 18: mod_base = OTHER; note = 2-fluororibose cytosine
  modified_base 18..19: mod_base = OTHER; note = S-phosphorothioate
  modified_base 19: mod_base = OTHER; note = 2-fluororibose uracil
  modified_base 19..20: mod_base = OTHER; note = S-phosphorothioate
  modified_base 20: mod_base = um
  modified_base 21: mod_base = um
  modified_base 22: mod_base = OTHER; note = 2-fluororibose cytosine
  modified_base 22..23: mod_base = OTHER; note = S-phosphorothioate
  modified_base 23: mod_base = OTHER; note = deoxyribose thymine
  modified_base 23..24: mod_base = OTHER; note = S-phosphorothioate
  modified_base 24: mod_base = OTHER; note = deoxyribose uracil (position 3 connectivity)
  modified_base 24..25: mod_base = OTHER; note = S-phosphorothioate
  modified_base 25: mod_base = OTHER; note = deoxyribose pseudoisocytidine, 5 connectivity
  modified_base 25..26: mod_base = OTHER; note R-N-(1,3-dimethylimidazolidin-2-ylidene)phosphoramidate
  modified_base 26: mod_base = um
  modified_base 27: mod_base = OTHER; note = 2-fluororibose cytosine
  modified_base 27..28: mod_base = OTHER; note = S-phosphorothioate
  modified_base 28: mod_base = gm
  modified_base 28..29: mod_base = OTHER; note = S-phosphorothioate
  modified_base 29: mod_base = OTHER; note = 2-O-methylribose adenine
  modified_base 29..30: mod_base = OTHER; note R-N-(1,3-dimethylimidazolidin-2-ylidene)phosphoramidate
  modified_base 30: mod_base = um
  source 1..30: mol_type = other RNA
cccagcagcttcagtccctttcttctcgat

SEQ ID NO: 472 - RNA, 30 nt, synthetic construct; identical to SEQ ID NO: 471
  misc_feature 1..30: note = Synthetic: WV-47382
  misc_feature 1..30: note = Synthetic: ADR-0104194
  modified_base 1: mod_base = cm
  modified_base 1..2: mod_base = OTHER; note R-N-(1,3-dimethylimidazolidin-2-ylidene)phosphoramidate
  modified_base 2: mod_base = cm
  modified_base 2..3: mod_base = OTHER; note = S-phosphorothioate
  modified_base 3: mod_base = cm
  modified_base 3..4: mod_base = OTHER; note = S-phosphorothioate
  modified_base 4: mod_base = OTHER; note = 2-fluororibose adenine
  modified_base 4..5: mod_base = OTHER; note = S-phosphorothioate
  modified_base 5: mod_base = OTHER; note = 2-fluororibose guanine
  modified_base 5..6: mod_base = OTHER; note = S-phosphorothioate
  modified_base 6: mod_base = cm
  modified_base 7: mod_base = OTHER; note = 2-O-methylribose adenine
  modified_base 7..8: mod_base = OTHER; note = S-phosphorothioate
  modified_base 8: mod_base = OTHER; note = 2-fluororibose guanine
  modified_base 8..9: mod_base = OTHER; note = S-phosphorothioate
  modified_base 9: mod_base = OTHER; note = 2-fluororibose cytosine
  modified_base 10: mod_base = um
  modified_base 10..11: mod_base = OTHER; note = S-phosphorothioate
  modified_base 11: mod_base = OTHER; note = 2-fluororibose uracil
  modified_base 11..12: mod_base = OTHER; note R-N-(1,3-dimethylimidazolidin-2-ylidene)phosphoramidate
  modified_base 12: mod_base = cm
  modified_base 13: mod_base = OTHER; note = 2-fluororibose adenine
  modified_base 13..14: mod_base = OTHER; note = S-phosphorothioate
  modified_base 14: mod_base = OTHER; note = 2-fluororibose guanine
  modified_base 14..15: mod_base = OTHER; note R-N-(1,3-dimethylimidazolidin-2-ylidene)phosphoramidate
  modified_base 15: mod_base = OTHER; note = 2-fluororibose uracil
  modified_base 16: mod_base = cm
  modified_base 16..17: mod_base = OTHER; note = S-phosphorothioate
  modified_base 17: mod_base = OTHER; note = 2-fluororibose cytosine
  modified_base 17..18: mod_base = OTHER; note = S-phosphorothioate
  modified_base 18: mod_base = OTHER; note = 2-fluororibose cytosine
  modified_base 18..19: mod_base = OTHER; note = S-phosphorothioate
  modified_base 19: mod_base = OTHER; note = 2-fluororibose uracil
  modified_base 19..20: mod_base = OTHER; note = S-phosphorothioate
  modified_base 20: mod_base = um
  modified_base 21: mod_base = um
  modified_base 22: mod_base = OTHER; note = 2-fluororibose cytosine
  modified_base 22..23: mod_base = OTHER; note = S-phosphorothioate
  modified_base 23: mod_base = OTHER; note = deoxyribose thymine
  modified_base 23..24: mod_base = OTHER; note = S-phosphorothioate
  modified_base 24: mod_base = OTHER; note = deoxyribose uracil (position 3 connectivity)
  modified_base 24..25: mod_base = OTHER; note = S-phosphorothioate
  modified_base 25: mod_base = OTHER; note = deoxyribose 5-methylisocytosine
  modified_base 25..26: mod_base = OTHER; note = N-(1,3-dimethylimidazolidin-2-ylidene)phosphoramidate
  modified_base 26: mod_base = um
  modified_base 27: mod_base = OTHER; note = 2-fluororibose cytosine
  modified_base 27..28: mod_base = OTHER; note = S-phosphorothioate
  modified_base 28: mod_base = gm
  modified_base 28..29: mod_base = OTHER; note = S-phosphorothioate
  modified_base 29: mod_base = OTHER; note = 2-O-methylribose adenine
  modified_base 29..30: mod_base = OTHER; note R-N-(1,3-dimethylimidazolidin-2-ylidene)phosphoramidate
  modified_base 30: mod_base = um
  source 1..30: mol_type = other RNA

SEQ ID NO: 473 - RNA, 30 nt, synthetic construct; identical to SEQ ID NO: 470
  misc_feature 1..30: note = Synthetic: WV-47383
  misc_feature 1..30: note = Synthetic: ADR-0104164
  modified_base 1: mod_base = cm
  modified_base 1..2: mod_base = OTHER; note R-N-(1,3-dimethylimidazolidin-2-ylidene)phosphoramidate
  modified_base 2: mod_base = cm
  modified_base 2..3: mod_base = OTHER; note = S-phosphorothioate
  modified_base 3: mod_base = cm
  modified_base 3..4: mod_base = OTHER; note = S-phosphorothioate
  modified_base 4: mod_base = OTHER; note = 2-fluororibose adenine
  modified_base 4..5: mod_base = OTHER; note = S-phosphorothioate
  modified_base 5: mod_base = OTHER; note = 2-fluororibose guanine
  modified_base 5..6: mod_base = OTHER; note = S-phosphorothioate
  modified_base 6: mod_base = cm
  modified_base 7: mod_base = OTHER; note = 2-O-methylribose adenine
  modified_base 7..8: mod_base = OTHER; note = S-phosphorothioate
  modified_base 8: mod_base = OTHER; note = 2-fluororibose guanine
  modified_base 8..9: mod_base = OTHER; note = S-phosphorothioate
  modified_base 9: mod_base = OTHER; note = 2-fluororibose cytosine
  modified_base 10: mod_base = um
  modified_base 10..11: mod_base = OTHER; note = S-phosphorothioate
  modified_base 11: mod_base = OTHER; note = 2-fluororibose uracil
  modified_base 11..12: mod_base = OTHER; note R-N-(1,3-dimethylimidazolidin-2-ylidene)phosphoramidate
  modified_base 12: mod_base = cm
  modified_base 13: mod_base = OTHER; note = 2-fluororibose adenine
  modified_base 13..14: mod_base = OTHER; note = S-phosphorothioate
  modified_base 14: mod_base = OTHER; note = 2-fluororibose guanine
  modified_base 14..15: mod_base = OTHER; note R-N-(1,3-dimethylimidazolidin-2-ylidene)phosphoramidate
  modified_base 15: mod_base = OTHER; note = 2-fluororibose uracil
  modified_base 16: mod_base = cm
  modified_base 16..17: mod_base = OTHER; note = S-phosphorothioate
  modified_base 17: mod_base = OTHER; note = 2-fluororibose cytosine
  modified_base 17..18: mod_base = OTHER; note = S-phosphorothioate
  modified_base 18: mod_base = OTHER; note = 2-fluororibose cytosine
  modified_base 18..19: mod_base = OTHER; note = S-phosphorothioate
  modified_base 19: mod_base = OTHER; note = 2-fluororibose uracil
  modified_base 19..20: mod_base = OTHER; note = S-phosphorothioate
  modified_base 20: mod_base = um
  modified_base 21: mod_base = um
  modified_base 22: mod_base = OTHER; note = 2-fluororibose cytosine
  modified_base 22..23: mod_base = OTHER; note = S-phosphorothioate
  modified_base 23: mod_base = OTHER; note = deoxyribose thymine
  modified_base 23..24: mod_base = OTHER; note = S-phosphorothioate
  modified_base 24: mod_base = OTHER; note = deoxyribose uracil (position 3 connectivity)
  modified_base 24..25: mod_base = OTHER; note = S-phosphorothioate
  modified_base 25: mod_base = OTHER; note = S-propanetriol thymine
  modified_base 25..26: mod_base = OTHER; note = S-phosphorothioate
  modified_base 26: mod_base = um
  modified_base 27: mod_base = OTHER; note = 2-fluororibose cytosine
  modified_base 27..28: mod_base = OTHER; note = S-phosphorothioate
  modified_base 28: mod_base = gm
  modified_base 28..29: mod_base = OTHER; note = S-phosphorothioate
  modified_base 29: mod_base = OTHER; note = 2-O-methylribose adenine
  modified_base 29..30: mod_base = OTHER; note R-N-(1,3-dimethylimidazolidin-2-ylidene)phosphoramidate
  modified_base 30: mod_base = um
  source 1..30: mol_type = other RNA

SEQ ID NO: 474 - RNA, 30 nt, synthetic construct; identical to SEQ ID NO: 470
  misc_feature 1..30: note = Synthetic: WV-47384
  misc_feature 1..30: note = Synthetic: ADR-0104161
  modified_base 1: mod_base = cm
  modified_base 1..2: mod_base = OTHER; note R-N-(1,3-dimethylimidazolidin-2-ylidene)phosphoramidate
  modified_base 2: mod_base = cm
  modified_base 2..3: mod_base = OTHER; note = S-phosphorothioate
  modified_base 3: mod_base = cm
  modified_base 3..4: mod_base = OTHER; note = S-phosphorothioate
  modified_base 4: mod_base = OTHER; note = 2-fluororibose adenine
  modified_base 4..5: mod_base = OTHER; note = S-phosphorothioate
  modified_base 5: mod_base = OTHER; note = 2-fluororibose guanine
  modified_base 5..6: mod_base = OTHER; note = S-phosphorothioate
  modified_base 6: mod_base = cm
  modified_base 7: mod_base = OTHER; note = 2-O-methylribose adenine
  modified_base 7..8: mod_base = OTHER; note = S-phosphorothioate
  modified_base 8: mod_base = OTHER; note = 2-fluororibose guanine
  modified_base 8..9: mod_base = OTHER; note = S-phosphorothioate
  modified_base 9: mod_base = OTHER; note = 2-fluororibose cytosine
  modified_base 10: mod_base = um
  modified_base 10..11: mod_base = OTHER; note = S-phosphorothioate
  modified_base 11: mod_base = OTHER; note = 2-fluororibose uracil
  modified_base 11..12: mod_base = OTHER; note R-N-(1,3-dimethylimidazolidin-2-ylidene)phosphoramidate
  modified_base 12: mod_base = cm
  modified_base 13: mod_base = OTHER; note = 2-fluororibose adenine
  modified_base 13..14: mod_base = OTHER; note = S-phosphorothioate
  modified_base 14: mod_base = OTHER; note = 2-fluororibose guanine
  modified_base 14..15: mod_base = OTHER; note R-N-(1,3-dimethylimidazolidin-2-ylidene)phosphoramidate
  modified_base 15: mod_base = OTHER; note = 2-fluororibose uracil
  modified_base 16: mod_base = cm
  modified_base 16..17: mod_base = OTHER; note = S-phosphorothioate
  modified_base 17: mod_base = OTHER; note = 2-fluororibose cytosine
  modified_base 17..18: mod_base = OTHER; note = S-phosphorothioate
  modified_base 18: mod_base = OTHER; note = 2-fluororibose cytosine
  modified_base 18..19: mod_base = OTHER; note = S-phosphorothioate
  modified_base 19: mod_base = OTHER; note = 2-fluororibose uracil
  modified_base 19..20: mod_base = OTHER; note = S-phosphorothioate
  modified_base 20: mod_base = um
  modified_base 21: mod_base = um
  modified_base 22: mod_base = OTHER; note = 2-fluororibose cytosine
  modified_base 22..23: mod_base = OTHER; note = S-phosphorothioate
  modified_base 23: mod_base = OTHER; note = deoxyribose thymine
  modified_base 23..24: mod_base = OTHER; note = S-phosphorothioate
  modified_base 24: mod_base = OTHER; note = deoxyribose uracil (position 3 connectivity)
  modified_base 24..25: mod_base = OTHER; note = S-phosphorothioate
  modified_base 25: mod_base = OTHER; note = R-propanetriol thymine
  modified_base 25..26: mod_base = OTHER; note = S-phosphorothioate
  modified_base 26: mod_base = um
  modified_base 27: mod_base = OTHER; note = 2-fluororibose cytosine
  modified_base 27..28: mod_base = OTHER; note = S-phosphorothioate
  modified_base 28: mod_base = gm
  modified_base 28..29: mod_base = OTHER; note = S-phosphorothioate
  modified_base 29: mod_base = OTHER; note = 2-O-methylribose adenine
  modified_base 29..30: mod_base = OTHER; note R-N-(1,3-dimethylimidazolidin-2-ylidene)phosphoramidate
  modified_base 30: mod_base = um
  source 1..30: mol_type = other RNA

SEQ ID NO: 475 - RNA, 30 nt, synthetic construct; identical to SEQ ID NO: 471
  misc_feature 1..30: note = Synthetic: WV-47385
  misc_feature 1..30: note = Synthetic: ADR-0104198
  modified_base 1: mod_base = cm
  modified_base 1..2: mod_base = OTHER; note R-N-(1,3-dimethylimidazolidin-2-ylidene)phosphoramidate
  modified_base 2: mod_base = cm
  modified_base 2..3: mod_base = OTHER; note = S-phosphorothioate
  modified_base 3: mod_base = cm
  modified_base 3..4: mod_base = OTHER; note = S-phosphorothioate
  modified_base 4: mod_base = OTHER; note = 2-fluororibose adenine
  modified_base 4..5: mod_base = OTHER; note = S-phosphorothioate
  modified_base 5: mod_base = OTHER; note = 2-fluororibose guanine
  modified_base 5..6: mod_base = OTHER; note = S-phosphorothioate
  modified_base 6: mod_base = cm
  modified_base 7: mod_base = OTHER; note = 2-O-methylribose adenine
  modified_base 7..8: mod_base = OTHER; note = S-phosphorothioate
  modified_base 8: mod_base = OTHER; note = 2-fluororibose guanine
  modified_base 8..9: mod_base = OTHER; note = S-phosphorothioate
  modified_base 9: mod_base = OTHER; note = 2-fluororibose cytosine
  modified_base 10: mod_base = um
  modified_base 10..11: mod_base = OTHER; note = S-phosphorothioate
  modified_base 11: mod_base = OTHER; note = 2-fluororibose uracil
  modified_base 11..12: mod_base = OTHER; note R-N-(1,3-dimethylimidazolidin-2-ylidene)phosphoramidate
  modified_base 12: mod_base = cm
  modified_base 13: mod_base = OTHER; note = 2-fluororibose adenine
  modified_base 13..14: mod_base = OTHER; note = S-phosphorothioate
  modified_base 14: mod_base = OTHER; note = 2-fluororibose guanine
  modified_base 14..15: mod_base = OTHER; note R-N-(1,3-dimethylimidazolidin-2-ylidene)phosphoramidate
  modified_base 15: mod_base = OTHER; note = 2-fluororibose uracil
  modified_base 16: mod_base = cm
  modified_base 16..17: mod_base = OTHER; note = S-phosphorothioate
  modified_base 17: mod_base = OTHER; note = 2-fluororibose cytosine
  modified_base 17..18: mod_base = OTHER; note = S-phosphorothioate
  modified_base 18: mod_base = OTHER; note = 2-fluororibose cytosine
  modified_base 18..19: mod_base = OTHER; note = S-phosphorothioate
  modified_base 19: mod_base = OTHER; note = 2-fluororibose uracil
  modified_base 19..20: mod_base = OTHER; note = S-phosphorothioate
  modified_base 20: mod_base = um
  modified_base 21: mod_base = um
  modified_base 22: mod_base = OTHER; note = 2-fluororibose cytosine
  modified_base 22..23: mod_base = OTHER; note = S-phosphorothioate
  modified_base 23: mod_base = OTHER; note = deoxyribose thymine
  modified_base 23..24: mod_base = OTHER; note = S-phosphorothioate
  modified_base 24: mod_base = OTHER; note = deoxyribose uracil (position 3 connectivity)
  modified_base 24..25: mod_base = OTHER; note = S-phosphorothioate
  modified_base 25: mod_base = OTHER; note = deoxyribose N-[(phenylamino)carbonyl]-cytosine
  modified_base 25..26: mod_base = OTHER; note = S-phosphorothioate
  modified_base 26: mod_base = um
  modified_base 27: mod_base = OTHER; note = 2-fluororibose cytosine
  modified_base 27..28: mod_base = OTHER; note = S-phosphorothioate
  modified_base 28: mod_base = gm
  modified_base 28..29: mod_base = OTHER; note = S-phosphorothioate
  modified_base 29: mod_base = OTHER; note = 2-O-methylribose adenine
  modified_base 29..30: mod_base = OTHER; note R-N-(1,3-dimethylimidazolidin-2-ylidene)phosphoramidate
  modified_base 30: mod_base = um
  source 1..30: mol_type = other RNA

SEQ ID NO: 476 - RNA, 30 nt, synthetic construct; identical to SEQ ID NO: 471
  misc_feature 1..30: note = Synthetic: WV-47386
  misc_feature 1..30: note = Synthetic: ADR-0104195
  modified_base 1: mod_base = cm
  modified_base 1..2: mod_base = OTHER; note R-N-(1,3-dimethylimidazolidin-2-ylidene)phosphoramidate
  modified_base 2: mod_base = cm
  modified_base 2..3: mod_base = OTHER; note = S-phosphorothioate
  modified_base 3: mod_base = cm
  modified_base 3..4: mod_base = OTHER; note = S-phosphorothioate
  modified_base 4: mod_base = OTHER; note = 2-fluororibose adenine
  modified_base 4..5: mod_base = OTHER; note = S-phosphorothioate
  modified_base 5: mod_base = OTHER; note = 2-fluororibose guanine
  modified_base 5..6: mod_base = OTHER; note = S-phosphorothioate
  modified_base 6: mod_base = cm
  modified_base 7: mod_base = OTHER; note = 2-O-methylribose adenine
  modified_base 7..8: mod_base = OTHER; note = S-phosphorothioate
  modified_base 8: mod_base = OTHER; note = 2-fluororibose guanine
  modified_base 8..9: mod_base = OTHER; note = S-phosphorothioate
  modified_base 9: mod_base = OTHER; note = 2-fluororibose cytosine
  modified_base 10: mod_base = um
  modified_base 10..11: mod_base = OTHER; note = S-phosphorothioate
  modified_base 11: mod_base = OTHER; note = 2-fluororibose uracil
  modified_base 11..12: mod_base = OTHER; note R-N-(1,3-dimethylimidazolidin-2-ylidene)phosphoramidate
  modified_base 12: mod_base = cm
  modified_base 13: mod_base = OTHER; note = 2-fluororibose adenine
  modified_base 13..14: mod_base = OTHER; note = S-phosphorothioate
  modified_base 14: mod_base = OTHER; note = 2-fluororibose guanine
  modified_base 14..15: mod_base = OTHER; note R-N-(1,3-dimethylimidazolidin-2-ylidene)phosphoramidate
  modified_base 15: mod_base = OTHER; note = 2-fluororibose uracil
  modified_base 16: mod_base = cm
  modified_base 16..17: mod_base = OTHER; note = S-phosphorothioate
  modified_base 17: mod_base = OTHER; note = 2-fluororibose cytosine
  modified_base 17..18: mod_base = OTHER; note = S-phosphorothioate
  modified_base 18: mod_base = OTHER; note = 2-fluororibose cytosine
  modified_base 18..19: mod_base = OTHER; note = S-phosphorothioate
  modified_base 19: mod_base = OTHER; note = 2-fluororibose uracil
  modified_base 19..20: mod_base = OTHER; note = S-phosphorothioate
  modified_base 20: mod_base = um
  modified_base 21: mod_base = um
  modified_base 22: mod_base = OTHER; note = 2-fluororibose cytosine
  modified_base 22..23: mod_base = OTHER; note = S-phosphorothioate
  modified_base 23: mod_base = OTHER; note = deoxyribose thymine
  modified_base 23..24: mod_base = OTHER; note = S-phosphorothioate
  modified_base 24: mod_base = OTHER; note = deoxyribose uracil (position 3 connectivity)
  modified_base 24..25: mod_base = OTHER; note = S-phosphorothioate
  modified_base 25: mod_base = OTHER; note = deoxyribose 4-N-naphthylcarbamoyl-cytidine
  modified_base 25..26: mod_base = OTHER; note = S-phosphorothioate
  modified_base 26: mod_base = um
  modified_base 27: mod_base = OTHER; note = 2-fluororibose cytosine
  modified_base 27..28: mod_base = OTHER; note = S-phosphorothioate
  modified_base 28: mod_base = gm
  modified_base 28..29: mod_base = OTHER; note = S-phosphorothioate
  modified_base 29: mod_base = OTHER; note = 2-O-methylribose adenine
  modified_base 29..30: mod_base = OTHER; note R-N-(1,3-dimethylimidazolidin-2-ylidene)phosphoramidate
  modified_base 30: mod_base = um
  source 1..30: mol_type = other RNA

SEQ ID NO: 477 - RNA, 30 nt, synthetic construct; identical to SEQ ID NO: 471
  misc_feature 1..30: note = Synthetic: WV-47387
  misc_feature 1..30: note = Synthetic: ADR-0104159
  modified_base 1: mod_base = cm
  modified_base 1..2: mod_base = OTHER; note R-N-(1,3-dimethylimidazolidin-2-ylidene)phosphoramidate
  modified_base 2: mod_base = cm
  modified_base 2..3: mod_base = OTHER; note = S-phosphorothioate
  modified_base 3: mod_base = cm
  modified_base 3..4: mod_base = OTHER; note = S-phosphorothioate
  modified_base 4: mod_base = OTHER; note = 2-fluororibose adenine
  modified_base 4..5: mod_base = OTHER; note = S-phosphorothioate
  modified_base 5: mod_base = OTHER; note = 2-fluororibose guanine
  modified_base 5..6: mod_base = OTHER; note = S-phosphorothioate
  modified_base 6: mod_base = cm
  modified_base 7: mod_base = OTHER; note = 2-O-methylribose adenine
  modified_base 7..8: mod_base = OTHER; note = S-phosphorothioate
  modified_base 8: mod_base = OTHER; note = 2-fluororibose guanine
  modified_base 8..9: mod_base = OTHER; note = S-phosphorothioate
  modified_base 9: mod_base = OTHER; note = 2-fluororibose cytosine
  modified_base 10: mod_base = um
  modified_base 10..11: mod_base = OTHER; note = S-phosphorothioate
  modified_base 11: mod_base = OTHER; note = 2-fluororibose uracil
  modified_base 11..12: mod_base = OTHER; note R-N-(1,3-dimethylimidazolidin-2-ylidene)phosphoramidate
  modified_base 12: mod_base = cm
  modified_base 13: mod_base = OTHER; note = 2-fluororibose adenine
  modified_base 13..14: mod_base = OTHER; note = S-phosphorothioate
  modified_base 14: mod_base = OTHER; note = 2-fluororibose guanine
  modified_base 14..15: mod_base = OTHER; note R-N-(1,3-dimethylimidazolidin-2-ylidene)phosphoramidate
  modified_base 15: mod_base = OTHER; note = 2-fluororibose uracil
  modified_base 16: mod_base = cm
  modified_base 16..17: mod_base = OTHER; note = S-phosphorothioate
  modified_base 17: mod_base = OTHER; note = 2-fluororibose cytosine
  modified_base 17..18: mod_base = OTHER; note = S-phosphorothioate
  modified_base 18: mod_base = OTHER; note = 2-fluororibose cytosine
  modified_base 18..19: mod_base = OTHER; note = S-phosphorothioate
  modified_base 19: mod_base = OTHER; note = 2-fluororibose uracil
  modified_base 19..20: mod_base = OTHER; note = S-phosphorothioate
  modified_base 20: mod_base = um
  modified_base 21: mod_base = um
  modified_base 22: mod_base = OTHER; note = 2-fluororibose cytosine
  modified_base 22..23: mod_base = OTHER; note = S-phosphorothioate
  modified_base 23: mod_base = OTHER; note = deoxyribose thymine
  modified_base 23..24: mod_base = OTHER; note = S-phosphorothioate
  modified_base 24: mod_base = OTHER; note = deoxyribose uracil (position 3 connectivity)
  modified_base 24..25: mod_base = OTHER; note = S-phosphorothioate
  modified_base 25: mod_base = OTHER; note = alpha-threofuranosyl (3-2 connectivity) cytosine
  modified_base 25..26: mod_base = OTHER; note = S-phosphorothioate
  modified_base 26: mod_base = um
  modified_base 27: mod_base = OTHER; note = 2-fluororibose cytosine
  modified_base 27..28: mod_base = OTHER; note = S-phosphorothioate
  modified_base 28: mod_base = gm
  modified_base 28..29: mod_base = OTHER; note = S-phosphorothioate
  modified_base 29: mod_base = OTHER; note = 2-O-methylribose adenine
  modified_base 29..30: mod_base = OTHER; note R-N-(1,3-dimethylimidazolidin-2-ylidene)phosphoramidate
  modified_base 30: mod_base = um
  source 1..30: mol_type = other RNA

SEQ ID NO: 478 - RNA, 30 nt, synthetic construct; identical to SEQ ID NO: 80
  misc_feature 1..30: note = Synthetic: WV-47388
  misc_feature 1..30: note = Synthetic: ADR-0104149
  modified_base 1: mod_base = cm
  modified_base 1..2: mod_base = OTHER; note R-N-(1,3-dimethylimidazolidin-2-ylidene)phosphoramidate
  modified_base 2: mod_base = cm
  modified_base 2..3: mod_base = OTHER; note = S-phosphorothioate
  modified_base 3: mod_base = cm
  modified_base 3..4: mod_base = OTHER; note = S-phosphorothioate
  modified_base 4: mod_base = OTHER; note = 2-fluororibose adenine
  modified_base 4..5: mod_base = OTHER; note = S-phosphorothioate
  modified_base 5: mod_base = OTHER; note = 2-fluororibose guanine
  modified_base 5..6: mod_base = OTHER; note = S-phosphorothioate
  modified_base 6: mod_base = cm
  modified_base 7: mod_base = OTHER; note = 2-O-methylribose adenine
  modified_base 7..8: mod_base = OTHER; note = S-phosphorothioate
  modified_base 8: mod_base = OTHER; note = 2-fluororibose guanine
  modified_base 8..9: mod_base = OTHER; note = S-phosphorothioate
  modified_base 9: mod_base = OTHER; note = 2-fluororibose cytosine
  modified_base 10: mod_base = um
  modified_base 10..11: mod_base = OTHER; note = S-phosphorothioate
  modified_base 11: mod_base = OTHER; note = 2-fluororibose uracil
  modified_base 11..12: mod_base = OTHER; note R-N-(1,3-dimethylimidazolidin-2-ylidene)phosphoramidate
  modified_base 12: mod_base = cm
  modified_base 13: mod_base = OTHER; note = 2-fluororibose adenine
  modified_base 13..14: mod_base = OTHER; note = S-phosphorothioate
  modified_base 14: mod_base = OTHER; note = 2-fluororibose guanine
  modified_base 14..15: mod_base = OTHER; note R-N-(1,3-dimethylimidazolidin-2-ylidene)phosphoramidate
  modified_base 15: mod_base = OTHER; note = 2-fluororibose uracil
  modified_base 16: mod_base = cm
  modified_base 16..17: mod_base = OTHER; note = S-phosphorothioate
  modified_base 17: mod_base = OTHER; note = 2-fluororibose cytosine
  modified_base 17..18: mod_base = OTHER; note = S-phosphorothioate
  modified_base 18: mod_base = OTHER; note = 2-fluororibose cytosine
  modified_base 18..19: mod_base = OTHER; note = S-phosphorothioate
  modified_base 19: mod_base = OTHER; note = 2-fluororibose uracil
  modified_base 19..20: mod_base = OTHER; note = S-phosphorothioate
  modified_base 20: mod_base = um
  modified_base 21: mod_base = um
  modified_base 22: mod_base = OTHER; note = 2-fluororibose cytosine
  modified_base 22..23: mod_base = OTHER; note = S-phosphorothioate
  modified_base 23: mod_base = OTHER; note = deoxyribose thymine
  modified_base 23..24: mod_base = OTHER; note = S-phosphorothioate
  modified_base 24: mod_base = OTHER; note = deoxyribose cytosine
  modified_base 24..25: mod_base = OTHER; note = S-phosphorothioate
  modified_base 25: mod_base = OTHER; note = deoxyribose inosine
  modified_base 25..26: mod_base = OTHER; note R-N-(1,3-dimethylimidazolidin-2-ylidene)phosphoramidate
  modified_base 26: mod_base = um
  modified_base 27: mod_base = OTHER; note = 2-fluororibose cytosine
  modified_base 27..28: mod_base = OTHER; note = S-phosphorothioate
  modified_base 28: mod_base = gm
  modified_base 28..29: mod_base = OTHER; note = S-phosphorothioate
  modified_base 29: mod_base = OTHER; note = 2-O-methylribose adenine
  modified_base 29..30: mod_base = OTHER; note R-N-(1,3-dimethylimidazolidin-2-ylidene)phosphoramidate
  modified_base 30: mod_base = um
  source 1..30: mol_type = other RNA

SEQ ID NO: 479 - RNA, 30 nt, synthetic construct; identical to SEQ ID NO: 80
  misc_feature 1..30: note = Synthetic: WV-47389
  misc_feature 1..30: note = Synthetic: ADR-0104147
  modified_base 1: mod_base = cm
  modified_base 1..2: mod_base = OTHER; note R-N-(1,3-dimethylimidazolidin-2-ylidene)phosphoramidate
  modified_base 2: mod_base = cm
  modified_base 2..3: mod_base = OTHER; note = S-phosphorothioate
  modified_base 3: mod_base = cm
  modified_base 3..4: mod_base = OTHER; note = S-phosphorothioate
  modified_base 4: mod_base = OTHER; note = 2-fluororibose adenine
  modified_base 4..5: mod_base = OTHER; note = S-phosphorothioate
  modified_base 5: mod_base = OTHER; note = 2-fluororibose guanine
  modified_base 5..6: mod_base = OTHER; note = S-phosphorothioate
  modified_base 6: mod_base = cm
  modified_base 7: mod_base = OTHER; note = 2-O-methylribose adenine
  modified_base 7..8: mod_base = OTHER; note = S-phosphorothioate
  modified_base 8: mod_base = OTHER; note = 2-fluororibose guanine
  modified_base 8..9: mod_base = OTHER; note = S-phosphorothioate
  modified_base 9: mod_base = OTHER; note = 2-fluororibose cytosine
  modified_base 10: mod_base = um
  modified_base 10..11: mod_base = OTHER; note = S-phosphorothioate
  modified_base 11: mod_base = OTHER; note = 2-fluororibose uracil
  modified_base 11..12: mod_base = OTHER; note R-N-(1,3-dimethylimidazolidin-2-ylidene)phosphoramidate
  modified_base 12: mod_base = cm
  modified_base 13: mod_base = OTHER; note = 2-fluororibose adenine
  modified_base 13..14: mod_base = OTHER; note = S-phosphorothioate
  modified_base 14: mod_base = OTHER; note = 2-fluororibose guanine
  modified_base 14..15: mod_base = OTHER; note R-N-(1,3-dimethylimidazolidin-2-ylidene)phosphoramidate
  modified_base 15: mod_base = OTHER; note = 2-fluororibose uracil
  modified_base 16: mod_base = cm
  modified_base 16..17: mod_base = OTHER; note = S-phosphorothioate
  modified_base 17: mod_base = OTHER; note = 2-fluororibose cytosine
  modified_base 17..18: mod_base = OTHER; note = S-phosphorothioate
  modified_base 18: mod_base = OTHER; note = 2-fluororibose cytosine
  modified_base 18..19: mod_base = OTHER; note = S-phosphorothioate
  modified_base 19: mod_base = OTHER; note = 2-fluororibose uracil
  modified_base 19..20: mod_base = OTHER; note = S-phosphorothioate
  modified_base 20: mod_base = um
  modified_base 21: mod_base = um
  modified_base 22: mod_base = OTHER; note = 2-fluororibose cytosine
  modified_base 22..23: mod_base = OTHER; note = S-phosphorothioate
  modified_base 23: mod_base = OTHER; note = deoxyribose thymine
  modified_base 23..24: mod_base = OTHER; note = S-phosphorothioate
  modified_base 24: mod_base = OTHER; note = deoxyribose cytosine
  modified_base 24..25: mod_base = OTHER; note = S-phosphorothioate
  modified_base 25: mod_base = OTHER; note = 2,4-locked-ribose inosine
  modified_base 25..26: mod_base = OTHER; note = S-phosphorothioate
  modified_base 26: mod_base = um
  modified_base 27: mod_base = OTHER; note = 2-fluororibose cytosine
  modified_base 27..28: mod_base = OTHER; note = S-phosphorothioate
  modified_base 28: mod_base = gm
  modified_base 28..29: mod_base = OTHER; note = S-phosphorothioate
  modified_base 29: mod_base = OTHER; note = 2-O-methylribose adenine
  modified_base 29..30: mod_base = OTHER; note R-N-(1,3-dimethylimidazolidin-2-ylidene)phosphoramidate
  modified_base 30: mod_base = um
  source 1..30: mol_type = other RNA

SEQ ID NO: 480 - RNA, 30 nt, synthetic construct
  misc_feature 1..30: note = Synthetic: WV-47390
  misc_feature 1..30: note = Synthetic: ADR-0104155
  modified_base 1: mod_base = cm
  modified_base 1..2: mod_base = OTHER; note R-N-(1,3-dimethylimidazolidin-2-ylidene)phosphoramidate
  modified_base 2: mod_base = cm
  modified_base 2..3: mod_base = OTHER; note = S-phosphorothioate
  modified_base 3: mod_base = cm
  modified_base 3..4: mod_base = OTHER; note = S-phosphorothioate
  modified_base 4: mod_base = OTHER; note = 2-fluororibose adenine
  modified_base 4..5: mod_base = OTHER; note = S-phosphorothioate
  modified_base 5: mod_base = OTHER; note = 2-fluororibose guanine
  modified_base 5..6: mod_base = OTHER; note = S-phosphorothioate
  modified_base 6: mod_base = cm
  modified_base 7: mod_base = OTHER; note = 2-O-methylribose adenine
  modified_base 7..8: mod_base = OTHER; note = S-phosphorothioate
  modified_base 8: mod_base = OTHER; note = 2-fluororibose guanine
  modified_base 8..9: mod_base = OTHER; note = S-phosphorothioate
  modified_base 9: mod_base = OTHER; note = 2-fluororibose cytosine
  modified_base 10: mod_base = um
  modified_base 10..11: mod_base = OTHER; note = S-phosphorothioate
  modified_base 11: mod_base = OTHER; note = 2-fluororibose uracil
  modified_base 11..12: mod_base = OTHER; note R-N-(1,3-dimethylimidazolidin-2-ylidene)phosphoramidate
  modified_base 12: mod_base = cm
  modified_base 13: mod_base = OTHER; note = 2-fluororibose adenine
  modified_base 13..14: mod_base = OTHER; note = S-phosphorothioate
  modified_base 14: mod_base = OTHER; note = 2-fluororibose guanine
  modified_base 14..15: mod_base = OTHER; note R-N-(1,3-dimethylimidazolidin-2-ylidene)phosphoramidate
  modified_base 15: mod_base = OTHER; note = 2-fluororibose uracil
  modified_base 16: mod_base = cm
  modified_base 16..17: mod_base = OTHER; note = S-phosphorothioate
  modified_base 17: mod_base = OTHER; note = 2-fluororibose cytosine
  modified_base 17..18: mod_base = OTHER; note = S-phosphorothioate
  modified_base 18: mod_base = OTHER; note = 2-fluororibose cytosine
  modified_base 18..19: mod_base = OTHER; note = S-phosphorothioate
  modified_base 19: mod_base = OTHER; note = 2-fluororibose uracil
  modified_base 19..20: mod_base = OTHER; note = S-phosphorothioate
  modified_base 20: mod_base = um
  modified_base 21: mod_base = um
  modified_base 22: mod_base = OTHER; note = 2-fluororibose cytosine
  modified_base 22..23: mod_base = OTHER; note = S-phosphorothioate
  modified_base 23: mod_base = OTHER; note = deoxyribose thymine
  modified_base 23..24: mod_base = OTHER; note = S-phosphorothioate
  modified_base 24: mod_base = OTHER; note = deoxyribose cytosine
  modified_base 24..25: mod_base = OTHER; note = S-phosphorothioate
  modified_base 25: mod_base = OTHER; note = deoxyribose 6-amino-9-substituted 8,9-dihydro-7H-purin-8-one
  modified_base 25..26: mod_base = OTHER; note R-N-(1,3-dimethylimidazolidin-2-ylidene)phosphoramidate
  modified_base 26: mod_base = um
  modified_base 27: mod_base = OTHER; note = 2-fluororibose cytosine
  modified_base 27..28: mod_base = OTHER; note = S-phosphorothioate
  modified_base 28: mod_base = gm
  modified_base 28..29: mod_base = OTHER; note = S-phosphorothioate
  modified_base 29: mod_base = OTHER; note = 2-O-methylribose adenine
  modified_base 29..30: mod_base = OTHER; note R-N-(1,3-dimethylimidazolidin-2-ylidene)phosphoramidate
  modified_base 30: mod_base = um
  source 1..30: mol_type = other RNA
cccagcagcttcagtccctttctcatcgat

SEQ ID NO: 481 - RNA, 30 nt, synthetic construct; identical to SEQ ID NO: 480
  misc_feature 1..30: note = Synthetic: WV-47391
  misc_feature 1..30: note = Synthetic: ADR-0104151
  modified_base 1: mod_base = cm
  modified_base 1..2: mod_base = OTHER; note R-N-(1,3-dimethylimidazolidin-2-ylidene)phosphoramidate
  modified_base 2: mod_base = cm
  modified_base 2..3: mod_base = OTHER; note = S-phosphorothioate
  modified_base 3: mod_base = cm
  modified_base 3..4: mod_base = OTHER; note = S-phosphorothioate
  modified_base 4: mod_base = OTHER; note = 2-fluororibose adenine
  modified_base 4..5: mod_base = OTHER; note = S-phosphorothioate
  modified_base 5: mod_base = OTHER; note = 2-fluororibose guanine
  modified_base 5..6: mod_base = OTHER; note = S-phosphorothioate
  modified_base 6: mod_base = cm
  modified_base 7: mod_base = OTHER; note = 2-O-methylribose adenine
  modified_base 7..8: mod_base = OTHER; note = S-phosphorothioate
  modified_base 8: mod_base = OTHER; note = 2-fluororibose guanine
  modified_base 8..9: mod_base = OTHER; note = S-phosphorothioate
  modified_base 9: mod_base = OTHER; note = 2-fluororibose cytosine
  modified_base 10: mod_base = um
  modified_base 10..11: mod_base = OTHER; note = S-phosphorothioate
  modified_base 11: mod_base = OTHER; note = 2-fluororibose uracil
  modified_base 11..12: mod_base = OTHER; note R-N-(1,3-dimethylimidazolidin-2-ylidene)phosphoramidate
  modified_base 12: mod_base = cm
  modified_base 13: mod_base = OTHER; note = 2-fluororibose adenine
  modified_base 13..14: mod_base = OTHER; note = S-phosphorothioate
  modified_base 14: mod_base = OTHER; note = 2-fluororibose guanine
  modified_base 14..15: mod_base = OTHER; note R-N-(1,3-dimethylimidazolidin-2-ylidene)phosphoramidate
  modified_base 15: mod_base = OTHER; note = 2-fluororibose uracil
  modified_base 16: mod_base = cm
  modified_base 16..17: mod_base = OTHER; note = S-phosphorothioate
  modified_base 17: mod_base = OTHER; note = 2-fluororibose cytosine
  modified_base 17..18: mod_base = OTHER; note = S-phosphorothioate
  modified_base 18: mod_base = OTHER; note = 2-fluororibose cytosine
  modified_base 18..19: mod_base = OTHER; note = S-phosphorothioate
  modified_base 19: mod_base = OTHER; note = 2-fluororibose uracil
  modified_base 19..20: mod_base = OTHER; note = S-phosphorothioate
  modified_base 20: mod_base = um
  modified_base 21: mod_base = um
  modified_base 22: mod_base = OTHER; note = 2-fluororibose cytosine
  modified_base 22..23: mod_base = OTHER; note = S-phosphorothioate
  modified_base 23: mod_base = OTHER; note = deoxyribose thymine
  modified_base 23..24: mod_base = OTHER; note = S-phosphorothioate
  modified_base 24: mod_base = OTHER; note = deoxyribose cytosine
  modified_base 24..25: mod_base = OTHER; note = S-phosphorothioate
  modified_base 25: mod_base = OTHER; note = deoxyribose 6-deamino-oxo-adenine
  modified_base 25..26: mod_base = OTHER; note R-N-(1,3-dimethylimidazolidin-2-ylidene)phosphoramidate
  modified_base 26: mod_base = um
  modified_base 27: mod_base = OTHER; note = 2-fluororibose cytosine
  modified_base 27..28: mod_base = OTHER; note = S-phosphorothioate
  modified_base 28: mod_base = gm
  modified_base 28..29: mod_base = OTHER; note = S-phosphorothioate
  modified_base 29: mod_base = OTHER; note = 2-O-methylribose adenine
  modified_base 29..30: mod_base = OTHER; note R-N-(1,3-dimethylimidazolidin-2-ylidene)phosphoramidate
  modified_base 30: mod_base = um
  source 1..30: mol_type = other RNA

SEQ ID NO: 482 - RNA, 30 nt, synthetic construct; identical to SEQ ID NO: 480
  misc_feature 1..30: note = Synthetic: WV-47392
  misc_feature 1..30: note = Synthetic: ADR-0104154
  modified_base 1: mod_base = cm
  modified_base 1..2: mod_base = OTHER; note R-N-(1,3-dimethylimidazolidin-2-ylidene)phosphoramidate
  modified_base 2: mod_base = cm
  modified_base 2..3: mod_base = OTHER; note = S-phosphorothioate
  modified_base 3: mod_base = cm
  modified_base 3..4: mod_base = OTHER; note = S-phosphorothioate
  modified_base 4: mod_base = OTHER; note = 2-fluororibose adenine
  modified_base 4..5: mod_base = OTHER; note = S-phosphorothioate
  modified_base 5: mod_base = OTHER; note = 2-fluororibose guanine
  modified_base 5..6: mod_base = OTHER; note = S-phosphorothioate
  modified_base 6: mod_base = cm
  modified_base 7: mod_base = OTHER; note = 2-O-methylribose adenine
  modified_base 7..8: mod_base = OTHER; note = S-phosphorothioate
  modified_base 8: mod_base = OTHER; note = 2-fluororibose guanine
  modified_base 8..9: mod_base = OTHER; note = S-phosphorothioate
  modified_base 9: mod_base = OTHER; note = 2-fluororibose cytosine
  modified_base 10: mod_base = um
  modified_base 10..11: mod_base = OTHER; note = S-phosphorothioate
  modified_base 11: mod_base = OTHER; note = 2-fluororibose uracil
  modified_base 11..12: mod_base = OTHER; note R-N-(1,3-dimethylimidazolidin-2-ylidene)phosphoramidate
  modified_base 12: mod_base = cm
  modified_base 13: mod_base = OTHER; note = 2-fluororibose adenine
  modified_base 13..14: mod_base = OTHER; note = S-phosphorothioate
  modified_base 14: mod_base = OTHER; note = 2-fluororibose guanine
  modified_base 14..15: mod_base = OTHER; note R-N-(1,3-dimethylimidazolidin-2-ylidene)phosphoramidate
  modified_base 15: mod_base = OTHER; note = 2-fluororibose uracil
  modified_base 16: mod_base = cm
  modified_base 16..17: mod_base = OTHER; note = S-phosphorothioate
  modified_base 17: mod_base = OTHER; note = 2-fluororibose cytosine
  modified_base 17..18: mod_base = OTHER; note = S-phosphorothioate
  modified_base 18: mod_base = OTHER; note = 2-fluororibose cytosine
  modified_base 18..19: mod_base = OTHER; note = S-phosphorothioate
  modified_base 19: mod_base = OTHER; note = 2-fluororibose uracil
  modified_base 19..20: mod_base = OTHER; note = S-phosphorothioate
  modified_base 20: mod_base = um
  modified_base 21: mod_base = um
  modified_base 22: mod_base = OTHER; note = 2-fluororibose cytosine
  modified_base 22..23: mod_base = OTHER; note = S-phosphorothioate
  modified_base 23: mod_base = OTHER; note = deoxyribose thymine
  modified_base 23..24: mod_base = OTHER; note = S-phosphorothioate
  modified_base 24: mod_base = OTHER; note = deoxyribose cytosine
  modified_base 24..25: mod_base = OTHER; note = S-phosphorothioate
  modified_base 25: mod_base = OTHER; note = deoxyribose 2-hydroxybenzimidazole
  modified_base 25..26: mod_base = OTHER; note = S-phosphorothioate
  modified_base 26: mod_base = um
  modified_base 27: mod_base = OTHER; note = 2-fluororibose cytosine
  modified_base 27..28: mod_base = OTHER; note = S-phosphorothioate
  modified_base 28: mod_base = gm
  modified_base 28..29: mod_base = OTHER; note = S-phosphorothioate
  modified_base 29: mod_base = OTHER; note = 2-O-methylribose adenine
  modified_base 29..30: mod_base = OTHER; note R-N-(1,3-dimethylimidazolidin-2-ylidene)phosphoramidate
  modified_base 30: mod_base = um
  source 1..30: mol_type = other RNA

SEQ ID NO: 483 - RNA, 30 nt, synthetic construct
  misc_feature 1..30: note = Synthetic: WV-47393
  misc_feature 1..30: note = Synthetic: ADR-0104148
  modified_base 1: mod_base = cm
  modified_base 1..2: mod_base = OTHER; note R-N-(1,3-dimethylimidazolidin-2-ylidene)phosphoramidate
  modified_base 2: mod_base = cm
  modified_base 2..3: mod_base = OTHER; note = S-phosphorothioate
  modified_base 3: mod_base = cm
  modified_base 3..4: mod_base = OTHER; note = S-phosphorothioate
  modified_base 4: mod_base = OTHER; note = 2-fluororibose adenine
  modified_base 4..5: mod_base = OTHER; note = S-phosphorothioate
  modified_base 5: mod_base = OTHER; note = 2-fluororibose guanine
  modified_base 5..6: mod_base = OTHER; note = S-phosphorothioate
  modified_base 6: mod_base = cm
  modified_base 7: mod_base = OTHER; note = 2-O-methylribose adenine
  modified_base 7..8: mod_base = OTHER; note = S-phosphorothioate
  modified_base 8: mod_base = OTHER; note = 2-fluororibose guanine
  modified_base 8..9: mod_base = OTHER; note = S-phosphorothioate
  modified_base 9: mod_base = OTHER; note = 2-fluororibose cytosine
  modified_base 10: mod_base = um
  modified_base 10..11: mod_base = OTHER; note = S-phosphorothioate
  modified_base 11: mod_base = OTHER; note = 2-fluororibose uracil
  modified_base 11..12: mod_base = OTHER; note R-N-(1,3-dimethylimidazolidin-2-ylidene)phosphoramidate
  modified_base 12: mod_base = cm
  modified_base 13: mod_base = OTHER; note = 2-fluororibose adenine
  modified_base 13..14: mod_base = OTHER; note = S-phosphorothioate
  modified_base 14: mod_base = OTHER; note = 2-fluororibose guanine
  modified_base 14..15: mod_base = OTHER; note R-N-(1,3-dimethylimidazolidin-2-ylidene)phosphoramidate
  modified_base 15: mod_base = OTHER; note = 2-fluororibose uracil
  modified_base 16: mod_base = cm
  modified_base 16..17: mod_base = OTHER; note = S-phosphorothioate
  modified_base 17: mod_base = OTHER; note = 2-fluororibose cytosine
  modified_base 17..18: mod_base = OTHER; note = S-phosphorothioate
  modified_base 18: mod_base = OTHER; note = 2-fluororibose cytosine
  modified_base 18..19: mod_base = OTHER; note = S-phosphorothioate
  modified_base 19: mod_base = OTHER; note = 2-fluororibose uracil
  modified_base 19..20: mod_base = OTHER; note = S-phosphorothioate
  modified_base 20: mod_base = um
  modified_base 21: mod_base = um
  modified_base 22: mod_base = OTHER; note = 2-fluororibose cytosine
  modified_base 22..23: mod_base = OTHER; note = S-phosphorothioate
  modified_base 23: mod_base = OTHER; note = deoxyribose thymine
  modified_base 23..24: mod_base = OTHER; note = S-phosphorothioate
  modified_base 24: mod_base = OTHER; note = deoxyribose cytosine
  modified_base 24..25: mod_base = OTHER; note = S-phosphorothioate
  modified_base 25: mod_base = OTHER; note = deoxyribose uracil (position 3 connectivity)
  modified_base 25..26: mod_base = OTHER; note R-N-(1,3-dimethylimidazolidin-2-ylidene)phosphoramidate
  modified_base 26: mod_base = um
  modified_base 27: mod_base = OTHER; note = 2-fluororibose cytosine
  modified_base 27..28: mod_base = OTHER; note = S-phosphorothioate
  modified_base 28: mod_base = gm
  modified_base 28..29: mod_base = OTHER; note = S-phosphorothioate
  modified_base 29: mod_base = OTHER; note = 2-O-methylribose adenine
  modified_base 29..30: mod_base = OTHER; note R-N-(1,3-dimethylimidazolidin-2-ylidene)phosphoramidate
  modified_base 30: mod_base = um
  source 1..30: mol_type = other RNA
cccagcagcttcagtccctttctcttcgat

SEQ ID NO: 484 - RNA, 30 nt, synthetic construct
  misc_feature 1..30: note = Synthetic: WV-47394
  misc_feature 1..30: note = Synthetic: ADR-0104157
  modified_base 1: mod_base = cm
  modified_base 1..2: mod_base = OTHER; note R-N-(1,3-dimethylimidazolidin-2-ylidene)phosphoramidate
  modified_base 2: mod_base = cm
  modified_base 2..3: mod_base = OTHER; note = S-phosphorothioate
  modified_base 3: mod_base = cm
  modified_base 3..4: mod_base = OTHER; note = S-phosphorothioate
  modified_base 4: mod_base = OTHER; note = 2-fluororibose adenine
  modified_base 4..5: mod_base = OTHER; note = S-phosphorothioate
  modified_base 5: mod_base = OTHER; note = 2-fluororibose guanine
  modified_base 5..6: mod_base = OTHER; note = S-phosphorothioate
  modified_base 6: mod_base = cm
  modified_base 7: mod_base = OTHER; note = 2-O-methylribose adenine
  modified_base 7..8: mod_base = OTHER; note = S-phosphorothioate
  modified_base 8: mod_base = OTHER; note = 2-fluororibose guanine
  modified_base 8..9: mod_base = OTHER; note = S-phosphorothioate
  modified_base 9: mod_base = OTHER; note = 2-fluororibose cytosine
  modified_base 10: mod_base = um
  modified_base 10..11: mod_base = OTHER; note = S-phosphorothioate
  modified_base 11: mod_base = OTHER; note = 2-fluororibose uracil
  modified_base 11..12: mod_base = OTHER; note R-N-(1,3-dimethylimidazolidin-2-ylidene)phosphoramidate
  modified_base 12: mod_base = cm
  modified_base 13: mod_base = OTHER; note = 2-fluororibose adenine
  modified_base 13..14: mod_base = OTHER; note = S-phosphorothioate
  modified_base 14: mod_base = OTHER; note = 2-fluororibose guanine
  modified_base 14..15: mod_base = OTHER; note R-N-(1,3-dimethylimidazolidin-2-ylidene)phosphoramidate
  modified_base 15: mod_base = OTHER; note = 2-fluororibose uracil
  modified_base 16: mod_base = cm
  modified_base 16..17: mod_base = OTHER; note = S-phosphorothioate
  modified_base 17: mod_base = OTHER; note = 2-fluororibose cytosine
  modified_base 17..18: mod_base = OTHER; note = S-phosphorothioate
  modified_base 18: mod_base = OTHER; note = 2-fluororibose cytosine
  modified_base 18..19: mod_base = OTHER; note = S-phosphorothioate
  modified_base 19: mod_base = OTHER; note = 2-fluororibose uracil
  modified_base 19..20: mod_base = OTHER; note = S-phosphorothioate
  modified_base 20: mod_base = um
  modified_base 21: mod_base = um
  modified_base 22: mod_base = OTHER; note = 2-fluororibose cytosine
  modified_base 22..23: mod_base = OTHER; note = S-phosphorothioate
  modified_base 23: mod_base = OTHER; note = deoxyribose thymine
  modified_base 23..24: mod_base = OTHER; note = S-phosphorothioate
  modified_base 24: mod_base = OTHER; note = deoxyribose cytosine
  modified_base 24..25: mod_base = OTHER; note = S-phosphorothioate
  modified_base 25: mod_base = OTHER; note = deoxyribose pseudoisocytidine, 5 connectivity
  modified_base 25..26: mod_base = OTHER; note R-N-(1,3-dimethylimidazolidin-2-ylidene)phosphoramidate
  modified_base 26: mod_base = um
  modified_base 27: mod_base = OTHER; note = 2-fluororibose cytosine
  modified_base 27..28: mod_base = OTHER; note = S-phosphorothioate
  modified_base 28: mod_base = gm
  modified_base 28..29: mod_base = OTHER; note = S-phosphorothioate
  modified_base 29: mod_base = OTHER; note = 2-O-methylribose adenine
  modified_base 29..30: mod_base = OTHER; note R-N-(1,3-dimethylimidazolidin-2-ylidene)phosphoramidate
  modified_base 30: mod_base = um
  source 1..30: mol_type = other RNA
cccagcagcttcagtccctttctcctcgat

SEQ ID NO: 485 - RNA, 30 nt, synthetic construct; identical to SEQ ID NO: 484
  misc_feature 1..30: note = Synthetic: WV-47395
  misc_feature 1..30: note = Synthetic: ADR-0104152
  modified_base 1: mod_base = cm
  modified_base 1..2: mod_base = OTHER; note R-N-(1,3-dimethylimidazolidin-2-ylidene)phosphoramidate
  modified_base 2: mod_base = cm
  modified_base 2..3: mod_base = OTHER; note = S-phosphorothioate
  modified_base 3: mod_base = cm
  modified_base 3..4: mod_base = OTHER; note = S-phosphorothioate
  modified_base 4: mod_base = OTHER; note = 2-fluororibose adenine
  modified_base 4..5: mod_base = OTHER; note = S-phosphorothioate
  modified_base 5: mod_base = OTHER; note = 2-fluororibose guanine
  modified_base 5..6: mod_base = OTHER; note = S-phosphorothioate
  modified_base 6: mod_base = cm
  modified_base 7: mod_base = OTHER; note = 2-O-methylribose adenine
  modified_base 7..8: mod_base = OTHER; note = S-phosphorothioate
  modified_base 8: mod_base = OTHER; note = 2-fluororibose guanine
  modified_base 8..9: mod_base = OTHER; note = S-phosphorothioate
  modified_base 9: mod_base = OTHER; note = 2-fluororibose cytosine
  modified_base 10: mod_base = um
  modified_base 10..11: mod_base = OTHER; note = S-phosphorothioate
  modified_base 11: mod_base = OTHER; note = 2-fluororibose uracil
  modified_base 11..12: mod_base = OTHER; note R-N-(1,3-dimethylimidazolidin-2-ylidene)phosphoramidate
  modified_base 12: mod_base = cm
  modified_base 13: mod_base = OTHER; note = 2-fluororibose adenine
  modified_base 13..14: mod_base = OTHER; note = S-phosphorothioate
  modified_base 14: mod_base = OTHER; note = 2-fluororibose guanine
  modified_base 14..15: mod_base = OTHER; note R-N-(1,3-dimethylimidazolidin-2-ylidene)phosphoramidate
  modified_base 15: mod_base = OTHER; note = 2-fluororibose uracil
  modified_base 16: mod_base = cm
  modified_base 16..17: mod_base = OTHER; note = S-phosphorothioate
  modified_base 17: mod_base = OTHER; note = 2-fluororibose cytosine
  modified_base 17..18: mod_base = OTHER; note = S-phosphorothioate
  modified_base 18: mod_base = OTHER; note = 2-fluororibose cytosine
  modified_base 18..19: mod_base = OTHER; note = S-phosphorothioate
  modified_base 19: mod_base = OTHER; note = 2-fluororibose uracil
  modified_base 19..20: mod_base = OTHER; note = S-phosphorothioate
  modified_base 20: mod_base = um
  modified_base 21: mod_base = um
  modified_base 22: mod_base = OTHER; note = 2-fluororibose cytosine
  modified_base 22..23: mod_base = OTHER; note = S-phosphorothioate
  modified_base 23: mod_base = OTHER; note = deoxyribose thymine
  modified_base 23..24: mod_base = OTHER; note = S-phosphorothioate
  modified_base 24: mod_base = OTHER; note = deoxyribose cytosine
  modified_base 24..25: mod_base = OTHER; note = S-phosphorothioate
  modified_base 25: mod_base = OTHER; note = deoxyribose 5-methylisocytosine
  modified_base 25..26: mod_base = OTHER; note = N-(1,3-dimethylimidazolidin-2-ylidene)phosphoramidate
  modified_base 26: mod_base = um
  modified_base 27: mod_base = OTHER; note = 2-fluororibose cytosine
  modified_base 27..28: mod_base = OTHER; note = S-phosphorothioate
  modified_base 28: mod_base = gm
  modified_base 28..29: mod_base = OTHER; note = S-phosphorothioate
  modified_base 29: mod_base = OTHER; note = 2-O-methylribose adenine
  modified_base 29..30: mod_base = OTHER; note R-N-(1,3-dimethylimidazolidin-2-ylidene)phosphoramidate
  modified_base 30: mod_base = um
  source 1..30: mol_type = other RNA

SEQ ID NO: 486 - RNA, 30 nt, synthetic construct; identical to SEQ ID NO: 483
  misc_feature 1..30: note = Synthetic: WV-47396
  misc_feature 1..30: note = Synthetic: ADR-0104145
  modified_base 1: mod_base = cm
  modified_base 1..2: mod_base = OTHER; note R-N-(1,3-dimethylimidazolidin-2-ylidene)phosphoramidate
  modified_base 2: mod_base = cm
  modified_base 2..3: mod_base = OTHER; note = S-phosphorothioate
  modified_base 3: mod_base = cm
  modified_base 3..4: mod_base = OTHER; note = S-phosphorothioate
  modified_base 4: mod_base = OTHER; note = 2-fluororibose adenine
  modified_base 4..5: mod_base = OTHER; note = S-phosphorothioate
  modified_base 5: mod_base = OTHER; note = 2-fluororibose guanine
  modified_base 5..6: mod_base = OTHER; note = S-phosphorothioate
  modified_base 6: mod_base = cm
  modified_base 7: mod_base = OTHER; note = 2-O-methylribose adenine
  modified_base 7..8: mod_base = OTHER; note = S-phosphorothioate
  modified_base 8: mod_base = OTHER; note = 2-fluororibose guanine
  modified_base 8..9: mod_base = OTHER; note = S-phosphorothioate
  modified_base 9: mod_base = OTHER; note = 2-fluororibose cytosine
  modified_base 10: mod_base = um
  modified_base 10..11: mod_base = OTHER; note = S-phosphorothioate
  modified_base 11: mod_base = OTHER; note = 2-fluororibose uracil
  modified_base 11..12: mod_base = OTHER; note R-N-(1,3-dimethylimidazolidin-2-ylidene)phosphoramidate
  modified_base 12: mod_base = cm
  modified_base 13: mod_base = OTHER; note = 2-fluororibose adenine
  modified_base 13..14: mod_base = OTHER; note = S-phosphorothioate
  modified_base 14: mod_base = OTHER; note = 2-fluororibose guanine
  modified_base 14..15: mod_base = OTHER; note R-N-(1,3-dimethylimidazolidin-2-ylidene)phosphoramidate
  modified_base 15: mod_base = OTHER; note = 2-fluororibose uracil
  modified_base 16: mod_base = cm
  modified_base 16..17: mod_base = OTHER; note = S-phosphorothioate
  modified_base 17: mod_base = OTHER; note = 2-fluororibose cytosine
  modified_base 17..18: mod_base = OTHER; note = S-phosphorothioate
  modified_base 18: mod_base = OTHER; note = 2-fluororibose cytosine
  modified_base 18..19: mod_base = OTHER; note = S-phosphorothioate
  modified_base 19: mod_base = OTHER; note = 2-fluororibose uracil
  modified_base 19..20: mod_base = OTHER; note = S-phosphorothioate
  modified_base 20: mod_base = um
  modified_base 21: mod_base = um
  modified_base 22: mod_base = OTHER; note = 2-fluororibose cytosine
  modified_base 22..23: mod_base = OTHER; note = S-phosphorothioate
  modified_base 23: mod_base = OTHER; note = deoxyribose thymine
  modified_base 23..24: mod_base = OTHER; note = S-phosphorothioate
  modified_base 24: mod_base = OTHER; note = deoxyribose cytosine
  modified_base 24..25: mod_base = OTHER; note = S-phosphorothioate
  modified_base 25: mod_base = OTHER; note = S-propanetriol thymine
  modified_base 25..26: mod_base = OTHER; note = S-phosphorothioate
  modified_base 26: mod_base = um
  modified_base 27: mod_base = OTHER; note = 2-fluororibose cytosine
  modified_base 27..28: mod_base = OTHER; note = S-phosphorothioate
  modified_base 28: mod_base = gm
  modified_base 28..29: mod_base = OTHER; note = S-phosphorothioate
  modified_base 29: mod_base = OTHER; note = 2-O-methylribose adenine
  modified_base 29..30: mod_base = OTHER; note R-N-(1,3-dimethylimidazolidin-2-ylidene)phosphoramidate
  modified_base 30: mod_base = um
  source 1..30: mol_type = other RNA

SEQ ID NO: 487 - RNA, 30 nt, synthetic construct; identical to SEQ ID NO: 483
  misc_feature 1..30: note = Synthetic: WV-47397
  misc_feature 1..30: note = Synthetic: ADR-0104142
  modified_base 1: mod_base = cm
  modified_base 1..2: mod_base = OTHER; note R-N-(1,3-dimethylimidazolidin-2-ylidene)phosphoramidate
  modified_base 2: mod_base = cm
  modified_base 2..3: mod_base = OTHER; note = S-phosphorothioate
  modified_base 3: mod_base = cm
  modified_base 3..4: mod_base = OTHER; note = S-phosphorothioate
  modified_base 4: mod_base = OTHER; note = 2-fluororibose adenine
  modified_base 4..5: mod_base = OTHER; note = S-phosphorothioate
  modified_base 5: mod_base = OTHER; note = 2-fluororibose guanine
  modified_base 5..6: mod_base = OTHER; note = S-phosphorothioate
  modified_base 6: mod_base = cm
  modified_base 7: mod_base = OTHER; note = 2-O-methylribose adenine
  modified_base 7..8: mod_base = OTHER; note = S-phosphorothioate
  modified_base 8: mod_base = OTHER; note = 2-fluororibose guanine
  modified_base 8..9: mod_base = OTHER; note = S-phosphorothioate
  modified_base 9: mod_base = OTHER; note = 2-fluororibose cytosine
  modified_base 10: mod_base = um
  modified_base 10..11: mod_base = OTHER; note = S-phosphorothioate
  modified_base 11: mod_base = OTHER; note = 2-fluororibose uracil
  modified_base 11..12: mod_base = OTHER; note R-N-(1,3-dimethylimidazolidin-2-ylidene)phosphoramidate
  modified_base 12: mod_base = cm
  modified_base 13: mod_base = OTHER; note = 2-fluororibose adenine
  modified_base 13..14: mod_base = OTHER; note = S-phosphorothioate
  modified_base 14: mod_base = OTHER; note = 2-fluororibose guanine
  modified_base 14..15: mod_base = OTHER; note R-N-(1,3-dimethylimidazolidin-2-ylidene)phosphoramidate
  modified_base 15: mod_base = OTHER; note = 2-fluororibose uracil
  modified_base 16: mod_base = cm
  modified_base 16..17: mod_base = OTHER; note = S-phosphorothioate
  modified_base 17: mod_base = OTHER; note = 2-fluororibose cytosine
  modified_base 17..18: mod_base = OTHER; note = S-phosphorothioate
  modified_base 18: mod_base = OTHER; note = 2-fluororibose cytosine
  modified_base 18..19: mod_base = OTHER; note = S-phosphorothioate
  modified_base 19: mod_base = OTHER; note = 2-fluororibose uracil
  modified_base 19..20: mod_base = OTHER; note = S-phosphorothioate
  modified_base 20: mod_base = um
  modified_base 21: mod_base = um
  modified_base 22: mod_base = OTHER; note = 2-fluororibose cytosine
  modified_base 22..23: mod_base = OTHER; note = S-phosphorothioate
  modified_base 23: mod_base = OTHER; note = deoxyribose thymine
  modified_base 23..24: mod_base = OTHER; note = S-phosphorothioate
  modified_base 24: mod_base = OTHER; note = deoxyribose cytosine
  modified_base 24..25: mod_base = OTHER; note = S-phosphorothioate
  modified_base 25: mod_base = OTHER; note = R-propanetriol thymine
  modified_base 25..26: mod_base = OTHER; note = S-phosphorothioate
  modified_base 26: mod_base = um
  modified_base 27: mod_base = OTHER; note = 2-fluororibose cytosine
  modified_base 27..28: mod_base = OTHER; note = S-phosphorothioate
  modified_base 28: mod_base = gm
  modified_base 28..29: mod_base = OTHER; note = S-phosphorothioate
  modified_base 29: mod_base = OTHER; note = 2-O-methylribose adenine
  modified_base 29..30: mod_base = OTHER; note R-N-(1,3-dimethylimidazolidin-2-ylidene)phosphoramidate
  modified_base 30: mod_base = um
  source 1..30: mol_type = other RNA

SEQ ID NO: 488 - RNA, 30 nt, synthetic construct; identical to SEQ ID NO: 484
  misc_feature 1..30: note = Synthetic: WV-47398
  misc_feature 1..30: note = Synthetic: ADR-0104156
  modified_base 1: mod_base = cm
  modified_base 1..2: mod_base = OTHER; note R-N-(1,3-dimethylimidazolidin-2-ylidene)phosphoramidate
  modified_base 2: mod_base = cm
  modified_base 2..3: mod_base = OTHER; note = S-phosphorothioate
  modified_base 3: mod_base = cm
  modified_base 3..4: mod_base = OTHER; note = S-phosphorothioate
  modified_base 4: mod_base = OTHER; note = 2-fluororibose adenine
  modified_base 4..5: mod_base = OTHER; note = S-phosphorothioate
  modified_base 5: mod_base = OTHER; note = 2-fluororibose guanine
  modified_base 5..6: mod_base = OTHER; note = S-phosphorothioate
  modified_base 6: mod_base = cm
  modified_base 7: mod_base = OTHER; note = 2-O-methylribose adenine
  modified_base 7..8: mod_base = OTHER; note = S-phosphorothioate
  modified_base 8: mod_base = OTHER; note = 2-fluororibose guanine
  modified_base 8..9: mod_base = OTHER; note = S-phosphorothioate
  modified_base 9: mod_base = OTHER; note = 2-fluororibose cytosine
  modified_base 10: mod_base = um
  modified_base 10..11: mod_base = OTHER; note = S-phosphorothioate
  modified_base 11: mod_base = OTHER; note = 2-fluororibose uracil
  modified_base 11..12: mod_base = OTHER; note R-N-(1,3-dimethylimidazolidin-2-ylidene)phosphoramidate
  modified_base 12: mod_base = cm
  modified_base 13: mod_base = OTHER; note = 2-fluororibose adenine
  modified_base 13..14: mod_base = OTHER; note = S-phosphorothioate
  modified_base 14: mod_base = OTHER; note = 2-fluororibose guanine
  modified_base 14..15: mod_base = OTHER; note R-N-(1,3-dimethylimidazolidin-2-ylidene)phosphoramidate
  modified_base 15: mod_base = OTHER; note = 2-fluororibose uracil
  modified_base 16: mod_base = cm
  modified_base 16..17: mod_base = OTHER; note = S-phosphorothioate
  modified_base 17: mod_base = OTHER; note = 2-fluororibose cytosine
  modified_base 17..18: mod_base = OTHER; note = S-phosphorothioate
  modified_base 18: mod_base = OTHER; note = 2-fluororibose cytosine
  modified_base 18..19: mod_base = OTHER; note = S-phosphorothioate
  modified_base 19: mod_base = OTHER; note = 2-fluororibose uracil
  modified_base 19..20: mod_base = OTHER; note = S-phosphorothioate
  modified_base 20: mod_base = um
  modified_base 21: mod_base = um
  modified_base 22: mod_base = OTHER; note = 2-fluororibose cytosine
  modified_base 22..23: mod_base = OTHER; note = S-phosphorothioate
  modified_base 23: mod_base = OTHER; note = deoxyribose thymine
  modified_base 23..24: mod_base = OTHER; note = S-phosphorothioate
  modified_base 24: mod_base = OTHER; note = deoxyribose cytosine
  modified_base 24..25: mod_base = OTHER; note = S-phosphorothioate
  modified_base 25: mod_base = OTHER; note = deoxyribose N-[(phenylamino)carbonyl]-cytosine
  modified_base 25..26: mod_base = OTHER; note = S-phosphorothioate
  modified_base 26: mod_base = um
  modified_base 27: mod_base = OTHER; note = 2-fluororibose cytosine
  modified_base 27..28: mod_base = OTHER; note = S-phosphorothioate
  modified_base 28: mod_base = gm
  modified_base 28..29: mod_base = OTHER; note = S-phosphorothioate
  modified_base 29: mod_base = OTHER; note = 2-O-methylribose adenine
  modified_base 29..30: mod_base = OTHER; note R-N-(1,3-dimethylimidazolidin-2-ylidene)phosphoramidate
  modified_base 30: mod_base = um
  source 1..30: mol_type = other RNA

SEQ ID NO: 489 - RNA, 30 nt, synthetic construct; identical to SEQ ID NO: 484
  misc_feature 1..30: note = Synthetic: WV-47399
  misc_feature 1..30: note = Synthetic: ADR-0104153
  modified_base 1: mod_base = cm
  modified_base 1..2: mod_base = OTHER; note R-N-(1,3-dimethylimidazolidin-2-ylidene)phosphoramidate
  modified_base 2: mod_base = cm
  modified_base 2..3: mod_base = OTHER; note = S-phosphorothioate
  modified_base 3: mod_base = cm
  modified_base 3..4: mod_base = OTHER; note = S-phosphorothioate
  modified_base 4: mod_base = OTHER; note = 2-fluororibose adenine
  modified_base 4..5: mod_base = OTHER; note = S-phosphorothioate
  modified_base 5: mod_base = OTHER; note = 2-fluororibose guanine
  modified_base 5..6: mod_base = OTHER; note = S-phosphorothioate
  modified_base 6: mod_base = cm
  modified_base 7: mod_base = OTHER; note = 2-O-methylribose adenine
  modified_base 7..8: mod_base = OTHER; note = S-phosphorothioate
  modified_base 8: mod_base = OTHER; note = 2-fluororibose guanine
  modified_base 8..9: mod_base = OTHER; note = S-phosphorothioate
  modified_base 9: mod_base = OTHER; note = 2-fluororibose cytosine
  modified_base 10: mod_base = um
  modified_base 10..11: mod_base = OTHER; note = S-phosphorothioate
  modified_base 11: mod_base = OTHER; note = 2-fluororibose uracil
  modified_base 11..12: mod_base = OTHER; note R-N-(1,3-dimethylimidazolidin-2-ylidene)phosphoramidate
  modified_base 12: mod_base = cm
  modified_base 13: mod_base = OTHER; note = 2-fluororibose adenine
  modified_base 13..14: mod_base = OTHER; note = S-phosphorothioate
  modified_base 14: mod_base = OTHER; note = 2-fluororibose guanine
  modified_base 14..15: mod_base = OTHER; note R-N-(1,3-dimethylimidazolidin-2-ylidene)phosphoramidate
  modified_base 15: mod_base = OTHER; note = 2-fluororibose uracil
  modified_base 16: mod_base = cm
  modified_base 16..17: mod_base = OTHER; note = S-phosphorothioate
  modified_base 17: mod_base = OTHER; note = 2-fluororibose cytosine
  modified_base 17..18: mod_base = OTHER; note = S-phosphorothioate
  modified_base 18: mod_base = OTHER; note = 2-fluororibose cytosine
  modified_base 18..19: mod_base = OTHER; note = S-phosphorothioate
  modified_base 19: mod_base = OTHER; note = 2-fluororibose uracil
  modified_base 19..20: mod_base = OTHER; note = S-phosphorothioate
  modified_base 20: mod_base = um
  modified_base 21: mod_base = um
  modified_base 22: mod_base = OTHER; note = 2-fluororibose cytosine
  modified_base 22..23: mod_base = OTHER; note = S-phosphorothioate
  modified_base 23: mod_base = OTHER; note = deoxyribose thymine
  modified_base 23..24: mod_base = OTHER; note = S-phosphorothioate
  modified_base 24: mod_base = OTHER; note = deoxyribose cytosine
  modified_base 24..25: mod_base = OTHER; note = S-phosphorothioate
  modified_base 25: mod_base = OTHER; note = deoxyribose 4-N-naphthylcarbamoyl-cytidine
  modified_base 25..26: mod_base = OTHER; note = S-phosphorothioate
  modified_base 26: mod_base = um
  modified_base 27: mod_base = OTHER; note = 2-fluororibose cytosine
  modified_base 27..28: mod_base = OTHER; note = S-phosphorothioate
  modified_base 28: mod_base = gm
  modified_base 28..29: mod_base = OTHER; note = S-phosphorothioate
  modified_base 29: mod_base = OTHER; note = 2-O-methylribose adenine
  modified_base 29..30: mod_base = OTHER; note R-N-(1,3-dimethylimidazolidin-2-ylidene)phosphoramidate
  modified_base 30: mod_base = um
  source 1..30: mol_type = other RNA

SEQ ID NO: 490 - RNA, 30 nt, synthetic construct; identical to SEQ ID NO: 484
  misc_feature 1..30: note = Synthetic: WV-47400
  misc_feature 1..30: note = Synthetic: ADR-0104140
  modified_base 1: mod_base = cm
  modified_base 1..2: mod_base = OTHER; note R-N-(1,3-dimethylimidazolidin-2-ylidene)phosphoramidate
  modified_base 2: mod_base = cm
  modified_base 2..3: mod_base = OTHER; note = S-phosphorothioate
  modified_base 3: mod_base = cm
  modified_base 3..4: mod_base = OTHER; note = S-phosphorothioate
  modified_base 4: mod_base = OTHER; note = 2-fluororibose adenine
  modified_base 4..5: mod_base = OTHER; note = S-phosphorothioate
  modified_base 5: mod_base = OTHER; note = 2-fluororibose guanine
  modified_base 5..6: mod_base = OTHER; note = S-phosphorothioate
  modified_base 6: mod_base = cm
  modified_base 7: mod_base = OTHER; note = 2-O-methylribose adenine
  modified_base 7..8: mod_base = OTHER; note = S-phosphorothioate
  modified_base 8: mod_base = OTHER; note = 2-fluororibose guanine
  modified_base 8..9: mod_base = OTHER; note = S-phosphorothioate
  modified_base 9: mod_base = OTHER; note = 2-fluororibose cytosine
  modified_base 10: mod_base = um
  modified_base 10..11: mod_base = OTHER; note = S-phosphorothioate
  modified_base 11: mod_base = OTHER; note = 2-fluororibose uracil
  modified_base 11..12: mod_base = OTHER; note R-N-(1,3-dimethylimidazolidin-2-ylidene)phosphoramidate
  modified_base 12: mod_base = cm
  modified_base 13: mod_base = OTHER; note = 2-fluororibose adenine
  modified_base 13..14: mod_base = OTHER; note = S-phosphorothioate
  modified_base 14: mod_base = OTHER; note = 2-fluororibose guanine
  modified_base 14..15: mod_base = OTHER; note R-N-(1,3-dimethylimidazolidin-2-ylidene)phosphoramidate
  modified_base 15: mod_base = OTHER; note = 2-fluororibose uracil
  modified_base 16: mod_base = cm
  modified_base 16..17: mod_base = OTHER; note = S-phosphorothioate
  modified_base 17: mod_base = OTHER; note = 2-fluororibose cytosine
  modified_base 17..18: mod_base = OTHER; note = S-phosphorothioate
  modified_base 18: mod_base = OTHER; note = 2-fluororibose cytosine
  modified_base 18..19: mod_base = OTHER; note = S-phosphorothioate
  modified_base 19: mod_base = OTHER; note = 2-fluororibose uracil
  modified_base 19..20: mod_base = OTHER; note = S-phosphorothioate
  modified_base 20: mod_base = um
  modified_base 21: mod_base = um
  modified_base 22: mod_base = OTHER; note = 2-fluororibose cytosine
  modified_base 22..23: mod_base = OTHER; note = S-phosphorothioate
  modified_base 23: mod_base = OTHER; note = deoxyribose thymine
  modified_base 23..24: mod_base = OTHER; note = S-phosphorothioate
  modified_base 24: mod_base = OTHER; note = deoxyribose cytosine
  modified_base 24..25: mod_base = OTHER; note = S-phosphorothioate
  modified_base 25: mod_base = OTHER; note = alpha-threofuranosyl (3-2 connectivity) cytosine
  modified_base 25..26: mod_base = OTHER; note = S-phosphorothioate
  modified_base 26: mod_base = um
  modified_base 27: mod_base = OTHER; note = 2-fluororibose cytosine
  modified_base 27..28: mod_base = OTHER; note = S-phosphorothioate
  modified_base 28: mod_base = gm
  modified_base 28..29: mod_base = OTHER; note = S-phosphorothioate
  modified_base 29: mod_base = OTHER; note = 2-O-methylribose adenine
  modified_base 29..30: mod_base = OTHER; note R-N-(1,3-dimethylimidazolidin-2-ylidene)phosphoramidate
  modified_base 30: mod_base = um
  source 1..30: mol_type = other RNA

SEQ ID NO: 491 - RNA, 30 nt, synthetic construct; identical to SEQ ID NO: 471
  misc_feature 1..30: note = Synthetic: WV-47401
  misc_feature 1..30: note = Synthetic: ADR-0104163
  modified_base 1: mod_base = cm
  modified_base 1..2: mod_base = OTHER; note R-N-(1,3-dimethylimidazolidin-2-ylidene)phosphoramidate
  modified_base 2: mod_base = cm
  modified_base 2..3: mod_base = OTHER; note = S-phosphorothioate
  modified_base 3: mod_base = cm
  modified_base 3..4: mod_base = OTHER; note = S-phosphorothioate
  modified_base 4: mod_base = OTHER; note = 2-fluororibose adenine
  modified_base 4..5: mod_base = OTHER; note = S-phosphorothioate
  modified_base 5: mod_base = OTHER; note = 2-fluororibose guanine
  modified_base 5..6: mod_base = OTHER; note = S-phosphorothioate
  modified_base 6: mod_base = cm
  modified_base 7: mod_base = OTHER; note = 2-O-methylribose adenine
  modified_base 7..8: mod_base = OTHER; note = S-phosphorothioate
  modified_base 8: mod_base = OTHER; note = 2-fluororibose guanine
  modified_base 8..9: mod_base = OTHER; note = S-phosphorothioate
  modified_base 9: mod_base = OTHER; note = 2-fluororibose cytosine
  modified_base 10: mod_base = um
  modified_base 10..11: mod_base = OTHER; note = S-phosphorothioate
  modified_base 11: mod_base = OTHER; note = 2-fluororibose uracil
  modified_base 11..12: mod_base = OTHER; note R-N-(1,3-dimethylimidazolidin-2-ylidene)phosphoramidate
  modified_base 12: mod_base = cm
  modified_base 13: mod_base = OTHER; note = 2-fluororibose adenine
  modified_base 13..14: mod_base = OTHER; note = S-phosphorothioate
  modified_base 14: mod_base = OTHER; note = 2-fluororibose guanine
  modified_base 14..15: mod_base = OTHER; note R-N-(1,3-dimethylimidazolidin-2-ylidene)phosphoramidate
  modified_base 15: mod_base = OTHER; note = 2-fluororibose uracil
  modified_base 16: mod_base = cm
  modified_base 16..17: mod_base = OTHER; note = S-phosphorothioate
  modified_base 17: mod_base = OTHER; note = 2-fluororibose cytosine
  modified_base 17..18: mod_base = OTHER; note = S-phosphorothioate
  modified_base 18: mod_base = OTHER; note = 2-fluororibose cytosine
  modified_base 18..19: mod_base = OTHER; note = S-phosphorothioate
  modified_base 19: mod_base = OTHER; note = 2-fluororibose uracil
  modified_base 19..20: mod_base = OTHER; note = S-phosphorothioate
  modified_base 20: mod_base = um
  modified_base 21: mod_base = um
  modified_base 22: mod_base = OTHER; note = 2-fluororibose cytosine
  modified_base 22..23: mod_base = OTHER; note = S-phosphorothioate
  modified_base 23: mod_base = OTHER; note = deoxyribose thymine
  modified_base 23..24: mod_base = OTHER; note = S-phosphorothioate
  modified_base 24: mod_base = OTHER; note = deoxyribose uracil (position 3 connectivity)
  modified_base 24..25: mod_base = OTHER; note = S-phosphorothioate
  modified_base 25: mod_base = OTHER; note = S-propanetriol cytosine
  modified_base 25..26: mod_base = OTHER; note = S-phosphorothioate
  modified_base 26: mod_base = um
  modified_base 27: mod_base = OTHER; note = 2-fluororibose cytosine
  modified_base 27..28: mod_base = OTHER; note = S-phosphorothioate
  modified_base 28: mod_base = gm
  modified_base 28..29: mod_base = OTHER; note = S-phosphorothioate
  modified_base 29: mod_base = OTHER; note = 2-O-methylribose adenine
  modified_base 29..30: mod_base = OTHER; note R-N-(1,3-dimethylimidazolidin-2-ylidene)phosphoramidate
  modified_base 30: mod_base = um
  source 1..30: mol_type = other RNA

SEQ ID NO: 492 - RNA, 30 nt, synthetic construct; identical to SEQ ID NO: 471
  misc_feature 1..30: note = Synthetic: WV-47402
  misc_feature 1..30: note = Synthetic: ADR-0104160
  modified_base 1: mod_base = cm
  modified_base 1..2: mod_base = OTHER; note R-N-(1,3-dimethylimidazolidin-2-ylidene)phosphoramidate
  modified_base 2: mod_base = cm
  modified_base 2..3: mod_base = OTHER; note = S-phosphorothioate
  modified_base 3: mod_base = cm
  modified_base 3..4: mod_base = OTHER; note = S-phosphorothioate
  modified_base 4: mod_base = OTHER; note = 2-fluororibose adenine
  modified_base 4..5: mod_base = OTHER; note = S-phosphorothioate
  modified_base 5: mod_base = OTHER; note = 2-fluororibose guanine
  modified_base 5..6: mod_base = OTHER; note = S-phosphorothioate
  modified_base 6: mod_base = cm
  modified_base 7: mod_base = OTHER; note = 2-O-methylribose adenine
  modified_base 7..8: mod_base = OTHER; note = S-phosphorothioate
  modified_base 8: mod_base = OTHER; note = 2-fluororibose guanine
  modified_base 8..9: mod_base = OTHER; note = S-phosphorothioate
  modified_base 9: mod_base = OTHER; note = 2-fluororibose cytosine
  modified_base 10: mod_base = um
  modified_base 10..11: mod_base = OTHER; note = S-phosphorothioate
  modified_base 11: mod_base = OTHER; note = 2-fluororibose uracil
  modified_base 11..12: mod_base = OTHER; note R-N-(1,3-dimethylimidazolidin-2-ylidene)phosphoramidate
  modified_base 12: mod_base = cm
  modified_base 13: mod_base = OTHER; note = 2-fluororibose adenine
  modified_base 13..14: mod_base = OTHER; note = S-phosphorothioate
  modified_base 14: mod_base = OTHER; note = 2-fluororibose guanine
  modified_base 14..15: mod_base = OTHER; note R-N-(1,3-dimethylimidazolidin-2-ylidene)phosphoramidate
  modified_base 15: mod_base = OTHER; note = 2-fluororibose uracil
  modified_base 16: mod_base = cm
  modified_base 16..17: mod_base = OTHER; note = S-phosphorothioate
  modified_base 17: mod_base = OTHER; note = 2-fluororibose cytosine
  modified_base 17..18: mod_base = OTHER; note = S-phosphorothioate
  modified_base 18: mod_base = OTHER; note = 2-fluororibose cytosine
  modified_base 18..19: mod_base = OTHER; note = S-phosphorothioate
  modified_base 19: mod_base = OTHER; note = 2-fluororibose uracil
  modified_base 19..20: mod_base = OTHER; note = S-phosphorothioate
  modified_base 20: mod_base = um
  modified_base 21: mod_base = um
  modified_base 22: mod_base = OTHER; note = 2-fluororibose cytosine
  modified_base 22..23: mod_base = OTHER; note = S-phosphorothioate
  modified_base 23: mod_base = OTHER; note = deoxyribose thymine
  modified_base 23..24: mod_base = OTHER; note = S-phosphorothioate
  modified_base 24: mod_base = OTHER; note = deoxyribose uracil (position 3 connectivity)
  modified_base 24..25: mod_base = OTHER; note = S-phosphorothioate
  modified_base 25: mod_base = OTHER; note = R-propanetriol cytosine
  modified_base 25..26: mod_base = OTHER; note = S-phosphorothioate
  modified_base 26: mod_base = um
  modified_base 27: mod_base = OTHER; note = 2-fluororibose cytosine
  modified_base 27..28: mod_base = OTHER; note = S-phosphorothioate
  modified_base 28: mod_base = gm
  modified_base 28..29: mod_base = OTHER; note = S-phosphorothioate
  modified_base 29: mod_base = OTHER; note = 2-O-methylribose adenine
  modified_base 29..30: mod_base = OTHER; note R-N-(1,3-dimethylimidazolidin-2-ylidene)phosphoramidate
  modified_base 30: mod_base = um
  source 1..30: mol_type = other RNA

SEQ ID NO: 493 - RNA, 30 nt, synthetic construct; identical to SEQ ID NO: 471
  misc_feature 1..30: note = Synthetic: WV-47403
  misc_feature 1..30: note = Synthetic: ADR-0104165
  modified_base 1: mod_base = cm
  modified_base 1..2: mod_base = OTHER; note R-N-(1,3-dimethylimidazolidin-2-ylidene)phosphoramidate
  modified_base 2: mod_base = cm
  modified_base 2..3: mod_base = OTHER; note = S-phosphorothioate
  modified_base 3: mod_base = cm
  modified_base 3..4: mod_base = OTHER; note = S-phosphorothioate
  modified_base 4: mod_base = OTHER; note = 2-fluororibose adenine
  modified_base 4..5: mod_base = OTHER; note = S-phosphorothioate
  modified_base 5: mod_base = OTHER; note = 2-fluororibose guanine
  modified_base 5..6: mod_base = OTHER; note = S-phosphorothioate
  modified_base 6: mod_base = cm
  modified_base 7: mod_base = OTHER; note = 2-O-methylribose adenine
  modified_base 7..8: mod_base = OTHER; note = S-phosphorothioate
  modified_base 8: mod_base = OTHER; note = 2-fluororibose guanine
  modified_base 8..9: mod_base = OTHER; note = S-phosphorothioate
  modified_base 9: mod_base = OTHER; note = 2-fluororibose cytosine
  modified_base 10: mod_base = um
  modified_base 10..11: mod_base = OTHER; note = S-phosphorothioate
  modified_base 11: mod_base = OTHER; note = 2-fluororibose uracil
  modified_base 11..12: mod_base = OTHER; note R-N-(1,3-dimethylimidazolidin-2-ylidene)phosphoramidate
  modified_base 12: mod_base = cm
  modified_base 13: mod_base = OTHER; note = 2-fluororibose adenine
  modified_base 13..14: mod_base = OTHER; note = S-phosphorothioate
  modified_base 14: mod_base = OTHER; note = 2-fluororibose guanine
  modified_base 14..15: mod_base = OTHER; note R-N-(1,3-dimethylimidazolidin-2-ylidene)phosphoramidate
  modified_base 15: mod_base = OTHER; note = 2-fluororibose uracil
  modified_base 16: mod_base = cm
  modified_base 16..17: mod_base = OTHER; note = S-phosphorothioate
  modified_base 17: mod_base = OTHER; note = 2-fluororibose cytosine
  modified_base 17..18: mod_base = OTHER; note = S-phosphorothioate
  modified_base 18: mod_base = OTHER; note = 2-fluororibose cytosine
  modified_base 18..19: mod_base = OTHER; note = S-phosphorothioate
  modified_base 19: mod_base = OTHER; note = 2-fluororibose uracil
  modified_base 19..20: mod_base = OTHER; note = S-phosphorothioate
  modified_base 20: mod_base = um
  modified_base 21: mod_base = um
  modified_base 22: mod_base = OTHER; note = 2-fluororibose cytosine
  modified_base 22..23: mod_base = OTHER; note = S-phosphorothioate
  modified_base 23: mod_base = OTHER; note = deoxyribose thymine
  modified_base 23..24: mod_base = OTHER; note = S-phosphorothioate
  modified_base 24: mod_base = OTHER; note = deoxyribose uracil (position 3 connectivity)
  modified_base 24..25: mod_base = OTHER; note = S-phosphorothioate
  modified_base 25: mod_base = OTHER; note = S-propanetriol isocytosine
  modified_base 25..26: mod_base = OTHER; note = S-phosphorothioate
  modified_base 26: mod_base = um
  modified_base 27: mod_base = OTHER; note = 2-fluororibose cytosine
  modified_base 27..28: mod_base = OTHER; note = S-phosphorothioate
  modified_base 28: mod_base = gm
  modified_base 28..29: mod_base = OTHER; note = S-phosphorothioate
  modified_base 29: mod_base = OTHER; note = 2-O-methylribose adenine
  modified_base 29..30: mod_base = OTHER; note R-N-(1,3-dimethylimidazolidin-2-ylidene)phosphoramidate
  modified_base 30: mod_base = um
  source 1..30: mol_type = other RNA

SEQ ID NO: 494 - RNA, 30 nt, synthetic construct; identical to SEQ ID NO: 471
  misc_feature 1..30: note = Synthetic: WV-47404
  misc_feature 1..30: note = Synthetic: ADR-0104162
  modified_base 1: mod_base = cm
  modified_base 1..2: mod_base = OTHER; note R-N-(1,3-dimethylimidazolidin-2-ylidene)phosphoramidate
  modified_base 2: mod_base = cm
  modified_base 2..3: mod_base = OTHER; note = S-phosphorothioate
  modified_base 3: mod_base = cm
  modified_base 3..4: mod_base = OTHER; note = S-phosphorothioate
  modified_base 4: mod_base = OTHER; note = 2-fluororibose adenine
  modified_base 4..5: mod_base = OTHER; note = S-phosphorothioate
  modified_base 5: mod_base = OTHER; note = 2-fluororibose guanine
  modified_base 5..6: mod_base = OTHER; note = S-phosphorothioate
  modified_base 6: mod_base = cm
  modified_base 7: mod_base = OTHER; note = 2-O-methylribose adenine
  modified_base 7..8: mod_base = OTHER; note = S-phosphorothioate
  modified_base 8: mod_base = OTHER; note = 2-fluororibose guanine
  modified_base 8..9: mod_base = OTHER; note = S-phosphorothioate
  modified_base 9: mod_base = OTHER; note = 2-fluororibose cytosine
  modified_base 10: mod_base = um
  modified_base 10..11: mod_base = OTHER; note = S-phosphorothioate
  modified_base 11: mod_base = OTHER; note = 2-fluororibose uracil
  modified_base 11..12: mod_base = OTHER; note R-N-(1,3-dimethylimidazolidin-2-ylidene)phosphoramidate
  modified_base 12: mod_base = cm
  modified_base 13: mod_base = OTHER; note = 2-fluororibose adenine
  modified_base 13..14: mod_base = OTHER; note = S-phosphorothioate
  modified_base 14: mod_base = OTHER; note = 2-fluororibose guanine
  modified_base 14..15: mod_base = OTHER; note R-N-(1,3-dimethylimidazolidin-2-ylidene)phosphoramidate
  modified_base 15: mod_base = OTHER; note = 2-fluororibose uracil
  modified_base 16: mod_base = cm
  modified_base 16..17: mod_base = OTHER; note = S-phosphorothioate
  modified_base 17: mod_base = OTHER; note = 2-fluororibose cytosine
  modified_base 17..18: mod_base = OTHER; note = S-phosphorothioate
  modified_base 18: mod_base = OTHER; note = 2-fluororibose cytosine
  modified_base 18..19: mod_base = OTHER; note = S-phosphorothioate
  modified_base 19: mod_base = OTHER; note = 2-fluororibose uracil
  modified_base 19..20: mod_base = OTHER; note = S-phosphorothioate
  modified_base 20: mod_base = um
  modified_base 21: mod_base = um
  modified_base 22: mod_base = OTHER; note = 2-fluororibose cytosine
  modified_base 22..23: mod_base = OTHER; note = S-phosphorothioate
  modified_base 23: mod_base = OTHER; note = deoxyribose thymine
  modified_base 23..24: mod_base = OTHER; note = S-phosphorothioate
  modified_base 24: mod_base = OTHER; note = deoxyribose uracil (position 3 connectivity)
  modified_base 24..25: mod_base = OTHER; note = S-phosphorothioate
  modified_base 25: mod_base = OTHER; note = R-propanetriol isocytosine
  modified_base 25..26: mod_base = OTHER; note = S-phosphorothioate
  modified_base 26: mod_base = um
  modified_base 27: mod_base = OTHER; note = 2-fluororibose cytosine
  modified_base 27..28: mod_base = OTHER; note = S-phosphorothioate
  modified_base 28: mod_base = gm
  modified_base 28..29: mod_base = OTHER; note = S-phosphorothioate
  modified_base 29: mod_base = OTHER; note = 2-O-methylribose adenine
  modified_base 29..30: mod_base = OTHER; note R-N-(1,3-dimethylimidazolidin-2-ylidene)phosphoramidate
  modified_base 30: mod_base = um
  source 1..30: mol_type = other RNA

SEQ ID NO: 495 - RNA, 30 nt, synthetic construct; identical to SEQ ID NO: 484
  misc_feature 1..30: note = Synthetic: WV-47405
  misc_feature 1..30: note = Synthetic: ADR-0104144
  modified_base 1: mod_base = cm
  modified_base 1..2: mod_base = OTHER; note R-N-(1,3-dimethylimidazolidin-2-ylidene)phosphoramidate
  modified_base 2: mod_base = cm
  modified_base 2..3: mod_base = OTHER; note = S-phosphorothioate
  modified_base 3: mod_base = cm
  modified_base 3..4: mod_base = OTHER; note = S-phosphorothioate
  modified_base 4: mod_base = OTHER; note = 2-fluororibose adenine
  modified_base 4..5: mod_base = OTHER; note = S-phosphorothioate
  modified_base 5: mod_base = OTHER; note = 2-fluororibose guanine
  modified_base 5..6: mod_base = OTHER; note = S-phosphorothioate
  modified_base 6: mod_base = cm
  modified_base 7: mod_base = OTHER; note = 2-O-methylribose adenine
  modified_base 7..8: mod_base = OTHER; note = S-phosphorothioate
  modified_base 8: mod_base = OTHER; note = 2-fluororibose guanine
  modified_base 8..9: mod_base = OTHER; note = S-phosphorothioate
  modified_base 9: mod_base = OTHER; note = 2-fluororibose cytosine
  modified_base 10: mod_base = um
  modified_base 10..11: mod_base = OTHER; note = S-phosphorothioate
  modified_base 11: mod_base = OTHER; note = 2-fluororibose uracil
  modified_base 11..12: mod_base = OTHER; note R-N-(1,3-dimethylimidazolidin-2-ylidene)phosphoramidate
  modified_base 12: mod_base = cm
  modified_base 13: mod_base = OTHER; note = 2-fluororibose adenine
  modified_base 13..14: mod_base = OTHER; note = S-phosphorothioate
  modified_base 14: mod_base = OTHER; note = 2-fluororibose guanine
  modified_base 14..15: mod_base = OTHER; note R-N-(1,3-dimethylimidazolidin-2-ylidene)phosphoramidate
  modified_base 15: mod_base = OTHER; note = 2-fluororibose uracil
  modified_base 16: mod_base = cm
  modified_base 16..17: mod_base = OTHER; note = S-phosphorothioate
  modified_base 17: mod_base = OTHER; note = 2-fluororibose cytosine
  modified_base 17..18: mod_base = OTHER; note = S-phosphorothioate
  modified_base 18: mod_base = OTHER; note = 2-fluororibose cytosine
  modified_base 18..19: mod_base = OTHER; note = S-phosphorothioate
  modified_base 19: mod_base = OTHER; note = 2-fluororibose uracil
  modified_base 19..20: mod_base = OTHER; note = S-phosphorothioate
  modified_base 20: mod_base = um
  modified_base 21: mod_base = um
  modified_base 22: mod_base = OTHER; note = 2-fluororibose cytosine
  modified_base 22..23: mod_base = OTHER; note = S-phosphorothioate
  modified_base 23: mod_base = OTHER; note = deoxyribose thymine
  modified_base 23..24: mod_base = OTHER; note = S-phosphorothioate
  modified_base 24: mod_base = OTHER; note = deoxyribose cytosine
  modified_base 24..25: mod_base = OTHER; note = S-phosphorothioate
  modified_base 25: mod_base = OTHER; note = S-propanetriol cytosine
  modified_base 25..26: mod_base = OTHER; note = S-phosphorothioate
  modified_base 26: mod_base = um
  modified_base 27: mod_base = OTHER; note = 2-fluororibose cytosine
  modified_base 27..28: mod_base = OTHER; note = S-phosphorothioate
  modified_base 28: mod_base = gm
  modified_base 28..29: mod_base = OTHER; note = S-phosphorothioate
  modified_base 29: mod_base = OTHER; note = 2-O-methylribose adenine
  modified_base 29..30: mod_base = OTHER; note R-N-(1,3-dimethylimidazolidin-2-ylidene)phosphoramidate
  modified_base 30: mod_base = um
  source 1..30: mol_type = other RNA

SEQ ID NO: 496 - RNA, 30 nt, synthetic construct; identical to SEQ ID NO: 484
  misc_feature 1..30: note = Synthetic: WV-47406
  misc_feature 1..30: note = Synthetic: ADR-0104141
  modified_base 1: mod_base = cm
  modified_base 1..2: mod_base = OTHER; note R-N-(1,3-dimethylimidazolidin-2-ylidene)phosphoramidate
  modified_base 2: mod_base = cm
  modified_base 2..3: mod_base = OTHER; note = S-phosphorothioate
  modified_base 3: mod_base = cm
  modified_base 3..4: mod_base = OTHER; note = S-phosphorothioate
  modified_base 4: mod_base = OTHER; note = 2-fluororibose adenine
  modified_base 4..5: mod_base = OTHER; note = S-phosphorothioate
  modified_base 5: mod_base = OTHER; note = 2-fluororibose guanine
  modified_base 5..6: mod_base = OTHER; note = S-phosphorothioate
  modified_base 6: mod_base = cm
  modified_base 7: mod_base = OTHER; note = 2-O-methylribose adenine
  modified_base 7..8: mod_base = OTHER; note = S-phosphorothioate
  modified_base 8: mod_base = OTHER; note = 2-fluororibose guanine
  modified_base 8..9: mod_base = OTHER; note = S-phosphorothioate
  modified_base 9: mod_base = OTHER; note = 2-fluororibose cytosine
  modified_base 10: mod_base = um
  modified_base 10..11: mod_base = OTHER; note = S-phosphorothioate
  modified_base 11: mod_base = OTHER; note = 2-fluororibose uracil
  modified_base 11..12: mod_base = OTHER; note R-N-(1,3-dimethylimidazolidin-2-ylidene)phosphoramidate
  modified_base 12: mod_base = cm
  modified_base 13: mod_base = OTHER; note = 2-fluororibose adenine
  modified_base 13..14: mod_base = OTHER; note = S-phosphorothioate
  modified_base 14: mod_base = OTHER; note = 2-fluororibose guanine
  modified_base 14..15: mod_base = OTHER; note R-N-(1,3-dimethylimidazolidin-2-ylidene)phosphoramidate
  modified_base 15: mod_base = OTHER; note = 2-fluororibose uracil
  modified_base 16: mod_base = cm
  modified_base 16..17: mod_base = OTHER; note = S-phosphorothioate
  modified_base 17: mod_base = OTHER; note = 2-fluororibose cytosine
  modified_base 17..18: mod_base = OTHER; note = S-phosphorothioate
  modified_base 18: mod_base = OTHER; note = 2-fluororibose cytosine
  modified_base 18..19: mod_base = OTHER; note = S-phosphorothioate
  modified_base 19: mod_base = OTHER; note = 2-fluororibose uracil
  modified_base 19..20: mod_base = OTHER; note = S-phosphorothioate
  modified_base 20: mod_base = um
  modified_base 21: mod_base = um
  modified_base 22: mod_base = OTHER; note = 2-fluororibose cytosine
  modified_base 22..23: mod_base = OTHER; note = S-phosphorothioate
  modified_base 23: mod_base = OTHER; note = deoxyribose thymine
  modified_base 23..24: mod_base = OTHER; note = S-phosphorothioate
  modified_base 24: mod_base = OTHER; note = deoxyribose cytosine
  modified_base 24..25: mod_base = OTHER; note = S-phosphorothioate
  modified_base 25: mod_base = OTHER; note = R-propanetriol cytosine
  modified_base 25..26: mod_base = OTHER; note = S-phosphorothioate
  modified_base 26: mod_base = um
  modified_base 27: mod_base = OTHER; note = 2-fluororibose cytosine
  modified_base 27..28: mod_base = OTHER; note = S-phosphorothioate
  modified_base 28: mod_base = gm
  modified_base 28..29: mod_base = OTHER; note = S-phosphorothioate
  modified_base 29: mod_base = OTHER; note = 2-O-methylribose adenine
  modified_base 29..30: mod_base = OTHER; note R-N-(1,3-dimethylimidazolidin-2-ylidene)phosphoramidate
  modified_base 30: mod_base = um
  source 1..30: mol_type = other RNA

SEQ ID NO: 497 - RNA, 30 nt, synthetic construct; identical to SEQ ID NO: 484
  misc_feature 1..30: note = Synthetic: WV-47407
  misc_feature 1..30: note = Synthetic: ADR-0104146
  modified_base 1: mod_base = cm
  modified_base 1..2: mod_base = OTHER; note R-N-(1,3-dimethylimidazolidin-2-ylidene)phosphoramidate
  modified_base 2: mod_base = cm
  modified_base 2..3: mod_base = OTHER; note = S-phosphorothioate
  modified_base 3: mod_base = cm
  modified_base 3..4: mod_base = OTHER; note = S-phosphorothioate
  modified_base 4: mod_base = OTHER; note = 2-fluororibose adenine
  modified_base 4..5: mod_base = OTHER; note = S-phosphorothioate
  modified_base 5: mod_base = OTHER; note = 2-fluororibose guanine
  modified_base 5..6: mod_base = OTHER; note = S-phosphorothioate
  modified_base 6: mod_base = cm
  modified_base 7: mod_base = OTHER; note = 2-O-methylribose adenine
  modified_base 7..8: mod_base = OTHER; note = S-phosphorothioate
  modified_base 8: mod_base = OTHER; note = 2-fluororibose guanine
  modified_base 8..9: mod_base = OTHER; note = S-phosphorothioate
  modified_base 9: mod_base = OTHER; note = 2-fluororibose cytosine
  modified_base 10: mod_base = um
  modified_base 10..11: mod_base = OTHER; note = S-phosphorothioate
  modified_base 11: mod_base = OTHER; note = 2-fluororibose uracil
  modified_base 11..12: mod_base = OTHER; note R-N-(1,3-dimethylimidazolidin-2-ylidene)phosphoramidate
  modified_base 12: mod_base = cm
  modified_base 13: mod_base = OTHER; note = 2-fluororibose adenine
  modified_base 13..14: mod_base = OTHER; note = S-phosphorothioate
  modified_base 14: mod_base = OTHER; note = 2-fluororibose guanine
  modified_base 14..15: mod_base = OTHER; note R-N-(1,3-dimethylimidazolidin-2-ylidene)phosphoramidate
  modified_base 15: mod_base = OTHER; note = 2-fluororibose uracil
  modified_base 16: mod_base = cm
  modified_base 16..17: mod_base = OTHER; note = S-phosphorothioate
  modified_base 17: mod_base = OTHER; note = 2-fluororibose cytosine
  modified_base 17..18: mod_base = OTHER; note = S-phosphorothioate
  modified_base 18: mod_base = OTHER; note = 2-fluororibose cytosine
  modified_base 18..19: mod_base = OTHER; note = S-phosphorothioate
  modified_base 19: mod_base = OTHER; note = 2-fluororibose uracil
  modified_base 19..20: mod_base = OTHER; note = S-phosphorothioate
  modified_base 20: mod_base = um
  modified_base 21: mod_base = um
  modified_base 22: mod_base = OTHER; note = 2-fluororibose cytosine
  modified_base 22..23: mod_base = OTHER; note = S-phosphorothioate
  modified_base 23: mod_base = OTHER; note = deoxyribose thymine
  modified_base 23..24: mod_base = OTHER; note = S-phosphorothioate
  modified_base 24: mod_base = OTHER; note = deoxyribose cytosine
  modified_base 24..25: mod_base = OTHER; note = S-phosphorothioate
  modified_base 25: mod_base = OTHER; note = S-propanetriol isocytosine
  modified_base 25..26: mod_base = OTHER; note = S-phosphorothioate
  modified_base 26: mod_base = um
  modified_base 27: mod_base = OTHER; note = 2-fluororibose cytosine
  modified_base 27..28: mod_base = OTHER; note = S-phosphorothioate
  modified_base 28: mod_base = gm
  modified_base 28..29: mod_base = OTHER; note = S-phosphorothioate
  modified_base 29: mod_base = OTHER; note = 2-O-methylribose adenine
  modified_base 29..30: mod_base = OTHER; note R-N-(1,3-dimethylimidazolidin-2-ylidene)phosphoramidate
  modified_base 30: mod_base = um
  source 1..30: mol_type = other RNA

SEQ ID NO: 498 - RNA, 30 nt, synthetic construct; identical to SEQ ID NO: 484
  misc_feature 1..30: note = Synthetic: WV-47408
  misc_feature 1..30: note = Synthetic: ADR-0104143
  modified_base 1: mod_base = cm
  modified_base 1..2: mod_base = OTHER; note R-N-(1,3-dimethylimidazolidin-2-ylidene)phosphoramidate
  modified_base 2: mod_base = cm
  modified_base 2..3: mod_base = OTHER; note = S-phosphorothioate
  modified_base 3: mod_base = cm
  modified_base 3..4: mod_base = OTHER; note = S-phosphorothioate
  modified_base 4: mod_base = OTHER; note = 2-fluororibose adenine
  modified_base 4..5: mod_base = OTHER; note = S-phosphorothioate
  modified_base 5: mod_base = OTHER; note = 2-fluororibose guanine
  modified_base 5..6: mod_base = OTHER; note = S-phosphorothioate
  modified_base 6: mod_base = cm
  modified_base 7: mod_base = OTHER; note = 2-O-methylribose adenine
  modified_base 7..8: mod_base = OTHER; note = S-phosphorothioate
  modified_base 8: mod_base = OTHER; note = 2-fluororibose guanine
  modified_base 8..9: mod_base = OTHER; note = S-phosphorothioate
  modified_base 9: mod_base = OTHER; note = 2-fluororibose cytosine
  modified_base 10: mod_base = um
  modified_base 10..11: mod_base = OTHER; note = S-phosphorothioate
  modified_base 11: mod_base = OTHER; note = 2-fluororibose uracil
  modified_base 11..12: mod_base = OTHER; note R-N-(1,3-dimethylimidazolidin-2-ylidene)phosphoramidate
  modified_base 12: mod_base = cm
  modified_base 13: mod_base = OTHER; note = 2-fluororibose adenine
  modified_base 13..14: mod_base = OTHER; note = S-phosphorothioate
  modified_base 14: mod_base = OTHER; note = 2-fluororibose guanine
  modified_base 14..15: mod_base = OTHER; note R-N-(1,3-dimethylimidazolidin-2-ylidene)phosphoramidate
  modified_base 15: mod_base = OTHER; note = 2-fluororibose uracil
  modified_base 16: mod_base = cm
  modified_base 16..17: mod_base = OTHER; note = S-phosphorothioate
  modified_base 17: mod_base = OTHER; note = 2-fluororibose cytosine
  modified_base 17..18: mod_base = OTHER; note = S-phosphorothioate
  modified_base 18: mod_base = OTHER; note = 2-fluororibose cytosine
  modified_base 18..19: mod_base = OTHER; note = S-phosphorothioate
  modified_base 19: mod_base = OTHER; note = 2-fluororibose uracil
  modified_base 19..20: mod_base = OTHER; note = S-phosphorothioate
  modified_base 20: mod_base = um
  modified_base 21: mod_base = um
  modified_base 22: mod_base = OTHER; note = 2-fluororibose cytosine
  modified_base 22..23: mod_base = OTHER; note = S-phosphorothioate
  modified_base 23: mod_base = OTHER; note = deoxyribose thymine
  modified_base 23..24: mod_base = OTHER; note = S-phosphorothioate
  modified_base 24: mod_base = OTHER; note = deoxyribose cytosine
  modified_base 24..25: mod_base = OTHER; note = S-phosphorothioate
  modified_base 25: mod_base = OTHER; note = R-propanetriol isocytosine
  modified_base 25..26: mod_base = OTHER; note = S-phosphorothioate
  modified_base 26: mod_base = um
  modified_base 27: mod_base = OTHER; note = 2-fluororibose cytosine
  modified_base 27..28: mod_base = OTHER; note = S-phosphorothioate
  modified_base 28: mod_base = gm
  modified_base 28..29: mod_base = OTHER; note = S-phosphorothioate
  modified_base 29: mod_base = OTHER; note = 2-O-methylribose adenine
  modified_base 29..30: mod_base = OTHER; note R-N-(1,3-dimethylimidazolidin-2-ylidene)phosphoramidate
  modified_base 30: mod_base = um
  source 1..30: mol_type = other RNA

SEQ ID NO: 499 - RNA, 30 nt, synthetic construct; identical to SEQ ID NO: 439
  misc_feature 1..30: note = Synthetic: WV-47483
  misc_feature 1..30: note = Synthetic: ADR-0104215
  modified_base 1: mod_base = cm
  modified_base 1..2: mod_base = OTHER; note R-N-(1,3-dimethylimidazolidin-2-ylidene)phosphoramidate
  modified_base 2: mod_base = cm
  modified_base 2..3: mod_base = OTHER; note = S-phosphorothioate
  modified_base 3: mod_base = cm
  modified_base 3..4: mod_base = OTHER; note = S-phosphorothioate
  modified_base 4: mod_base = OTHER; note = 2-fluororibose adenine
  modified_base 4..5: mod_base = OTHER; note = S-phosphorothioate
  modified_base 5: mod_base = OTHER; note = 2-fluororibose guanine
  modified_base 5..6: mod_base = OTHER; note = S-phosphorothioate
  modified_base 6: mod_base = cm
  modified_base 7: mod_base = OTHER; note = 2-O-methylribose adenine
  modified_base 7..8: mod_base = OTHER; note = S-phosphorothioate
  modified_base 8: mod_base = OTHER; note = 2-fluororibose guanine
  modified_base 8..9: mod_base = OTHER; note = S-phosphorothioate
  modified_base 9: mod_base = OTHER; note = 2-fluororibose cytosine
  modified_base 10: mod_base = um
  modified_base 10..11: mod_base = OTHER; note = S-phosphorothioate
  modified_base 11: mod_base = OTHER; note = 2-fluororibose uracil
  modified_base 11..12: mod_base = OTHER; note R-N-(1,3-dimethylimidazolidin-2-ylidene)phosphoramidate
  modified_base 12: mod_base = cm
  modified_base 13: mod_base = OTHER; note = 2-fluororibose adenine
  modified_base 13..14: mod_base = OTHER; note = S-phosphorothioate
  modified_base 14: mod_base = OTHER; note = 2-fluororibose guanine
  modified_base 14..15: mod_base = OTHER; note R-N-(1,3-dimethylimidazolidin-2-ylidene)phosphoramidate
  modified_base 15: mod_base = OTHER; note = 2-fluororibose uracil
  modified_base 16: mod_base = cm
  modified_base 16..17: mod_base = OTHER; note = S-phosphorothioate
  modified_base 17: mod_base = OTHER; note = 2-fluororibose cytosine
  modified_base 17..18: mod_base = OTHER; note = S-phosphorothioate
  modified_base 18: mod_base = OTHER; note = 2-fluororibose cytosine
  modified_base 18..19: mod_base = OTHER; note = S-phosphorothioate
  modified_base 19: mod_base = OTHER; note = 2-fluororibose uracil
  modified_base 19..20: mod_base = OTHER; note = S-phosphorothioate
  modified_base 20: mod_base = um
  modified_base 21: mod_base = um
  modified_base 22: mod_base = OTHER; note = 2-fluororibose cytosine
  modified_base 22..23: mod_base = OTHER; note = S-phosphorothioate
  modified_base 23: mod_base = OTHER; note = deoxyribose thymine
  modified_base 23..24: mod_base = OTHER; note = S-phosphorothioate
  modified_base 24: mod_base = OTHER; note = deoxyribose 8-hydroxyguanine
  modified_base 24..25: mod_base = OTHER; note = phosphorothioate
  modified_base 25: mod_base = OTHER; note = deoxyribose inosine
  modified_base 25..26: mod_base = OTHER; note S-N-(1,3-dimethylimidazolidin-2-ylidene)phosphoramidate
  modified_base 26: mod_base = um
  modified_base 27: mod_base = OTHER; note = 2-fluororibose cytosine
  modified_base 27..28: mod_base = OTHER; note = S-phosphorothioate
  modified_base 28: mod_base = gm
  modified_base 28..29: mod_base = OTHER; note = S-phosphorothioate
  modified_base 29: mod_base = OTHER; note = 2-O-methylribose adenine
  modified_base 29..30: mod_base = OTHER; note R-N-(1,3-dimethylimidazolidin-2-ylidene)phosphoramidate
  modified_base 30: mod_base = um
  source 1..30: mol_type = other RNA

SEQ ID NO: 500 - RNA, 30 nt, synthetic construct; identical to SEQ ID NO: 273
  misc_feature 1..30: note = Synthetic: WV-47595
  misc_feature 1..30: note = Synthetic: ADR-0100553
  modified_base 1: mod_base = OTHER; note = 6-aminohexanol linked by phosphate to the 5' end of 2-O-methylribose cytosine
  modified_base 1..2: mod_base = OTHER; note R-N-(1,3-dimethylimidazolidin-2-ylidene)phosphoramidate
  modified_base 2: mod_base = cm
  modified_base 2..3: mod_base = OTHER; note = S-phosphorothioate
  modified_base 3: mod_base = cm
  modified_base 3..4: mod_base = OTHER; note = S-phosphorothioate
  modified_base 4: mod_base = OTHER; note = 2-fluororibose adenine
  modified_base 4..5: mod_base = OTHER; note = S-phosphorothioate
  modified_base 5: mod_base = OTHER; note = 2-fluororibose guanine
  modified_base 5..6: mod_base = OTHER; note = S-phosphorothioate
  modified_base 6: mod_base = cm
  modified_base 7: mod_base = OTHER; note = 2-O-methylribose adenine
  modified_base 7..8: mod_base = OTHER; note = S-phosphorothioate
  modified_base 8: mod_base = OTHER; note = 2-fluororibose guanine
  modified_base 8..9: mod_base = OTHER; note = S-phosphorothioate
  modified_base 9: mod_base = OTHER; note = 2-fluororibose cytosine
  modified_base 10: mod_base = um
  modified_base 10..11: mod_base = OTHER; note = S-phosphorothioate
  modified_base 11: mod_base = OTHER; note = 2-fluororibose uracil
  modified_base 11..12: mod_base = OTHER; note R-N-(1,3-dimethylimidazolidin-2-ylidene)phosphoramidate
  modified_base 12: mod_base = cm
  modified_base 13: mod_base = OTHER; note = 2-fluororibose adenine
  modified_base 13..14: mod_base = OTHER; note = S-phosphorothioate
  modified_base 14: mod_base = OTHER; note = 2-fluororibose guanine
  modified_base 14..15: mod_base = OTHER; note R-N-(1,3-dimethylimidazolidin-2-ylidene)phosphoramidate
  modified_base 15: mod_base = OTHER; note = 2-fluororibose uracil
  modified_base 16: mod_base = cm
  modified_base 16..17: mod_base = OTHER; note = S-phosphorothioate
  modified_base 17: mod_base = OTHER; note = 2-fluororibose cytosine
  modified_base 17..18: mod_base = OTHER; note = S-phosphorothioate
  modified_base 18: mod_base = OTHER; note = 2-fluororibose cytosine
  modified_base 18..19: mod_base = OTHER; note = S-phosphorothioate
  modified_base 19: mod_base = OTHER; note = 2-fluororibose uracil
  modified_base 19..20: mod_base = OTHER; note = S-phosphorothioate
  modified_base 20: mod_base = um
  modified_base 21: mod_base = um
  modified_base 22: mod_base = OTHER; note = 2-fluororibose cytosine
  modified_base 22..23: mod_base = OTHER; note = S-phosphorothioate
  modified_base 23: mod_base = OTHER; note = deoxyribose thymine
  modified_base 23..24: mod_base = OTHER; note = S-phosphorothioate
  modified_base 24: mod_base = OTHER; note = deoxyribose uracil (position 3 connectivity)
  modified_base 24..25: mod_base = OTHER; note = S-phosphorothioate
  modified_base 25: mod_base = OTHER; note = deoxyribose inosine
  modified_base 25..26: mod_base = OTHER; note S-N-(1,3-dimethylimidazolidin-2-ylidene)phosphoramidate
  modified_base 26: mod_base = um
  modified_base 27: mod_base = OTHER; note = 2-fluororibose cytosine
  modified_base 27..28: mod_base = OTHER; note = S-phosphorothioate
  modified_base 28: mod_base = gm
  modified_base 28..29: mod_base = OTHER; note = S-phosphorothioate
  modified_base 29: mod_base = OTHER; note = 2-O-methylribose adenine
  modified_base 29..30: mod_base = OTHER; note R-N-(1,3-dimethylimidazolidin-2-ylidene)phosphoramidate
  modified_base 30: mod_base = um
  source 1..30: mol_type = other RNA

SEQ ID NO: 501 - RNA, 30 nt, synthetic construct; identical to SEQ ID NO: 273
  misc_feature 1..30: note = Synthetic: WV-47596
  misc_feature 1..30: note = Synthetic: ADR-0100554
  modified_base 1: mod_base = OTHER; note = 6-aminohexanol linked by phosphate to the 5' end of 2-O-methylribose cytosine
  modified_base 1..2: mod_base = OTHER; note R-N-(1,3-dimethylimidazolidin-2-ylidene)phosphoramidate
  modified_base 2: mod_base = cm
  modified_base 2..3: mod_base = OTHER; note = S-phosphorothioate
  modified_base 3: mod_base = cm
  modified_base 3..4: mod_base = OTHER; note = S-phosphorothioate
  modified_base 4: mod_base = OTHER; note = 2-fluororibose adenine
  modified_base 4..5: mod_base = OTHER; note = S-phosphorothioate
  modified_base 5: mod_base = OTHER; note = 2-fluororibose guanine
  modified_base 5..6: mod_base = OTHER; note = S-phosphorothioate
  modified_base 6: mod_base = cm
  modified_base 7: mod_base = OTHER; note = 2-O-methylribose adenine
  modified_base 8: mod_base = OTHER; note = 2-fluororibose guanine
  modified_base 8..9: mod_base = OTHER; note = S-phosphorothioate
  modified_base 9: mod_base = OTHER; note = 2-fluororibose cytosine
  modified_base 9..10: mod_base = OTHER; note = S-phosphorothioate
  modified_base 10: mod_base = um
  modified_base 11: mod_base = OTHER; note = 2-fluororibose uracil
  modified_base 11..12: mod_base = OTHER; note R-N-(1,3-dimethylimidazolidin-2-ylidene)phosphoramidate
  modified_base 12: mod_base = cm
  modified_base 13: mod_base = OTHER; note = 2-fluororibose adenine
  modified_base 13..14: mod_base = OTHER; note = S-phosphorothioate
  modified_base 14: mod_base = OTHER; note = 2-fluororibose guanine
  modified_base 14..15: mod_base = OTHER; note R-N-(1,3-dimethylimidazolidin-2-ylidene)phosphoramidate
  modified_base 15: mod_base = OTHER; note = 2-fluororibose uracil
  modified_base 16: mod_base = cm
  modified_base 16..17: mod_base = OTHER; note = S-phosphorothioate
  modified_base 17: mod_base = OTHER; note = 2-fluororibose cytosine
  modified_base 17..18: mod_base = OTHER; note = S-phosphorothioate
  modified_base 18: mod_base = OTHER; note = 2-fluororibose cytosine
  modified_base 18..19: mod_base = OTHER; note = S-phosphorothioate
  modified_base 19: mod_base = OTHER; note = 2-fluororibose uracil
  modified_base 19..20: mod_base = OTHER; note R-N-(1,3-dimethylimidazolidin-2-ylidene)phosphoramidate
  modified_base 20: mod_base = um
  modified_base 21: mod_base = um
  modified_base 22: mod_base = OTHER; note = 2-fluororibose cytosine
  modified_base 22..23: mod_base = OTHER; note = S-phosphorothioate
  modified_base 23: mod_base = OTHER; note = deoxyribose thymine
  modified_base 23..24: mod_base = OTHER; note = S-phosphorothioate
  modified_base 24: mod_base = OTHER; note = deoxyribose uracil (position 3 connectivity)
  modified_base 24..25: mod_base = OTHER; note = S-phosphorothioate
  modified_base 25: mod_base = OTHER; note = deoxyribose inosine
  modified_base 25..26: mod_base = OTHER; note S-N-(1,3-dimethylimidazolidin-2-ylidene)phosphoramidate
  modified_base 26: mod_base = um
  modified_base 27: mod_base = OTHER; note = 2-fluororibose cytosine
  modified_base 27..28: mod_base = OTHER; note = S-phosphorothioate
  modified_base 28: mod_base = gm
  modified_base 28..29: mod_base = OTHER; note = S-phosphorothioate
  modified_base 29: mod_base = OTHER; note = 2-O-methylribose adenine
  modified_base 29..30: mod_base = OTHER; note R-N-(1,3-dimethylimidazolidin-2-ylidene)phosphoramidate
  modified_base 30: mod_base = um
  source 1..30: mol_type = other RNA

SEQ ID NO: 502 - RNA, 30 nt, synthetic construct; identical to SEQ ID NO: 273
  misc_feature 1..30: note = Synthetic: WV-47597
  misc_feature 1..30: note = Synthetic: ADR-0100555
  modified_base 1: mod_base = OTHER; note = triantennary GalNAc with C12 linker linked to 6-aminohexanol linked by phosphate to the 5' end of 2-O-methylribose cytosine
  modified_base 1..2: mod_base = OTHER; note R-N-(1,3-dimethylimidazolidin-2-ylidene)phosphoramidate
  modified_base 2: mod_base = cm
  modified_base 2..3: mod_base = OTHER; note = S-phosphorothioate
  modified_base 3: mod_base = cm
  modified_base 3..4: mod_base = OTHER; note = S-phosphorothioate
  modified_base 4: mod_base = OTHER; note = 2-fluororibose adenine
  modified_base 4..5: mod_base = OTHER; note = S-phosphorothioate
  modified_base 5: mod_base = OTHER; note = 2-fluororibose guanine
  modified_base 5..6: mod_base = OTHER; note = S-phosphorothioate
  modified_base 6: mod_base = cm
  modified_base 7: mod_base = OTHER; note = 2-O-methylribose adenine
  modified_base 7..8: mod_base = OTHER; note = S-phosphorothioate
  modified_base 8: mod_base = OTHER; note = 2-fluororibose guanine
  modified_base 8..9: mod_base = OTHER; note = S-phosphorothioate
  modified_base 9: mod_base = OTHER; note = 2-fluororibose cytosine
  modified_base 10: mod_base = um
  modified_base 10..11: mod_base = OTHER; note = S-phosphorothioate
  modified_base 11: mod_base = OTHER; note = 2-fluororibose uracil
  modified_base 11..12: mod_base = OTHER; note R-N-(1,3-dimethylimidazolidin-2-ylidene)phosphoramidate
  modified_base 12: mod_base = cm
  modified_base 13: mod_base = OTHER; note = 2-fluororibose adenine
  modified_base 13..14: mod_base = OTHER; note = S-phosphorothioate
  modified_base 14: mod_base = OTHER; note = 2-fluororibose guanine
  modified_base 14..15: mod_base = OTHER; note R-N-(1,3-dimethylimidazolidin-2-ylidene)phosphoramidate
  modified_base 15: mod_base = OTHER; note = 2-fluororibose uracil
  modified_base 16: mod_base = cm
  modified_base 17: mod_base = cm
  modified_base 17..18: mod_base = OTHER; note = S-phosphorothioate
  modified_base 18: mod_base = OTHER; note = 2-fluororibose cytosine
  modified_base 18..19: mod_base = OTHER; note = S-phosphorothioate
  modified_base 19: mod_base = OTHER; note = 2-fluororibose uracil
  modified_base 19..20: mod_base = OTHER; note = S-phosphorothioate
  modified_base 20: mod_base = um
  modified_base 21: mod_base = um
  modified_base 22: mod_base = OTHER; note = 2-fluororibose cytosine
  modified_base 22..23: mod_base = OTHER; note = S-phosphorothioate
  modified_base 23: mod_base = OTHER; note = deoxyribose thymine
  modified_base 23..24: mod_base = OTHER; note = S-phosphorothioate
  modified_base 24: mod_base = OTHER; note = deoxyribose uracil (position 3 connectivity)
  modified_base 24..25: mod_base = OTHER; note = S-phosphorothioate
  modified_base 25: mod_base = OTHER; note = deoxyribose inosine
  modified_base 25..26: mod_base = OTHER; note S-N-(1,3-dimethylimidazolidin-2-ylidene)phosphoramidate
  modified_base 26: mod_base = um
  modified_base 27: mod_base = OTHER; note = 2-fluororibose cytosine
  modified_base 27..28: mod_base = OTHER; note = S-phosphorothioate
  modified_base 28: mod_base = gm
  modified_base 28..29: mod_base = OTHER; note = S-phosphorothioate
  modified_base 29: mod_base = OTHER; note = 2-O-methylribose adenine
  modified_base 29..30: mod_base = OTHER; note R-N-(1,3-dimethylimidazolidin-2-ylidene)phosphoramidate
  modified_base 30: mod_base = um
  source 1..30: mol_type = other RNA

SEQ ID NO: 503 - RNA, 30 nt, synthetic construct; identical to SEQ ID NO: 273
  misc_feature 1..30: note = Synthetic: WV-47598
  misc_feature 1..30: note = Synthetic: ADR-0100556
  modified_base 1: mod_base = OTHER; note = triantennary GalNAc with C12 linker linked to 6-aminohexanol linked by phosphate to the 5' end of 2-O-methylribose cytosine
  modified_base 1..2: mod_base = OTHER; note R-N-(1,3-dimethylimidazolidin-2-ylidene)phosphoramidate
  modified_base 2: mod_base = cm
  modified_base 2..3: mod_base = OTHER; note = S-phosphorothioate
  modified_base 3: mod_base = cm
  modified_base 3..4: mod_base = OTHER; note = S-phosphorothioate
  modified_base 4: mod_base = OTHER; note = 2-fluororibose adenine
  modified_base 4..5: mod_base = OTHER; note = S-phosphorothioate
  modified_base 5: mod_base = OTHER; note = 2-fluororibose guanine
  modified_base 5..6: mod_base = OTHER; note = S-phosphorothioate
  modified_base 6: mod_base = cm
  modified_base 7: mod_base = OTHER; note = 2-O-methylribose adenine
  modified_base 8: mod_base = OTHER; note = 2-fluororibose guanine
  modified_base 8..9: mod_base = OTHER; note = S-phosphorothioate
  modified_base 9: mod_base = cm
  modified_base 10: mod_base = um
  modified_base 10..11: mod_base = OTHER; note = S-phosphorothioate
  modified_base 11: mod_base = OTHER; note = 2-fluororibose uracil
  modified_base 11..12: mod_base = OTHER; note R-N-(1,3-dimethylimidazolidin-2-ylidene)phosphoramidate
  modified_base 12: mod_base = cm
  modified_base 13: mod_base = OTHER; note = 2-fluororibose adenine
  modified_base 13..14: mod_base = OTHER; note = S-phosphorothioate
  modified_base 14: mod_base = OTHER; note = 2-fluororibose guanine
  modified_base 14..15: mod_base = OTHER; note R-N-(1,3-dimethylimidazolidin-2-ylidene)phosphoramidate
  modified_base 15: mod_base = um
  modified_base 16: mod_base = cm
  modified_base 17: mod_base = cm
  modified_base 17..18: mod_base = OTHER; note = S-phosphorothioate
  modified_base 18: mod_base = OTHER; note = 2-fluororibose cytosine
  modified_base 18..19: mod_base = OTHER; note = S-phosphorothioate
  modified_base 19: mod_base = OTHER; note = 2-fluororibose uracil
  modified_base 19..20: mod_base = OTHER; note = S-phosphorothioate
  modified_base 20: mod_base = um
  modified_base 21: mod_base = um
  modified_base 22: mod_base = OTHER; note = 2-fluororibose cytosine
  modified_base 22..23: mod_base = OTHER; note = S-phosphorothioate
  modified_base 23: mod_base = OTHER; note = deoxyribose thymine
  modified_base 23..24: mod_base = OTHER; note = S-phosphorothioate
  modified_base 24: mod_base = OTHER; note = deoxyribose uracil (position 3 connectivity)
  modified_base 24..25: mod_base = OTHER; note = S-phosphorothioate
  modified_base 25: mod_base = OTHER; note = deoxyribose inosine
  modified_base 25..26: mod_base = OTHER; note S-N-(1,3-dimethylimidazolidin-2-ylidene)phosphoramidate
  modified_base 26: mod_base = um
  modified_base 27: mod_base = OTHER; note = 2-fluororibose cytosine
  modified_base 27..28: mod_base = OTHER; note = S-phosphorothioate
  modified_base 28: mod_base = gm
  modified_base 28..29: mod_base = OTHER; note = S-phosphorothioate
  modified_base 29: mod_base = OTHER; note = 2-O-methylribose adenine
  modified_base 29..30: mod_base = OTHER; note R-N-(1,3-dimethylimidazolidin-2-ylidene)phosphoramidate
  modified_base 30: mod_base = um
  source 1..30: mol_type = other RNA

SEQ ID NO: 504 - RNA, 30 nt, synthetic construct; identical to SEQ ID NO: 273
  misc_feature 1..30: note = Synthetic: WV-47599
  misc_feature 1..30: note = Synthetic: ADR-0100557
  modified_base 1: mod_base = OTHER; note = triantennary GalNAc with C12 linker linked to 6-aminohexanol linked by phosphate to the 5' end of 2-O-methylribose cytosine
  modified_base 1..2: mod_base = OTHER; note R-N-(1,3-dimethylimidazolidin-2-ylidene)phosphoramidate
  modified_base 2: mod_base = cm
  modified_base 2..3: mod_base = OTHER; note = S-phosphorothioate
  modified_base 3: mod_base = cm
  modified_base 3..4: mod_base = OTHER; note = S-phosphorothioate
  modified_base 4: mod_base = OTHER; note = 2-fluororibose adenine
  modified_base 4..5: mod_base = OTHER; note = S-phosphorothioate
  modified_base 5: mod_base = OTHER; note = 2-fluororibose guanine
  modified_base 5..6: mod_base = OTHER; note = S-phosphorothioate
  modified_base 6: mod_base = cm
  modified_base 7: mod_base = OTHER; note = 2-O-methylribose adenine
  modified_base 8: mod_base = OTHER; note = 2-fluororibose guanine
  modified_base 8..9: mod_base = OTHER; note = S-phosphorothioate
  modified_base 9: mod_base = cm
  modified_base 10: mod_base = um
  modified_base 10..11: mod_base = OTHER; note = S-phosphorothioate
  modified_base 11: mod_base = um
  modified_base 11..12: mod_base = OTHER; note R-N-(1,3-dimethylimidazolidin-2-ylidene)phosphoramidate
  modified_base 12: mod_base = cm
  modified_base 13: mod_base = OTHER; note = 2-fluororibose adenine
  modified_base 13..14: mod_base = OTHER; note = S-phosphorothioate
  modified_base 14: mod_base = OTHER; note = 2-fluororibose guanine
  modified_base 14..15: mod_base = OTHER; note R-N-(1,3-dimethylimidazolidin-2-ylidene)phosphoramidate
  modified_base 15: mod_base = um
  modified_base 16: mod_base = cm
  modified_base 17: mod_base = cm
  modified_base 17..18: mod_base = OTHER; note = S-phosphorothioate
  modified_base 18: mod_base = OTHER; note = 2-fluororibose cytosine
  modified_base 18..19: mod_base = OTHER; note = S-phosphorothioate
  modified_base 19: mod_base = OTHER; note = 2-fluororibose uracil
  modified_base 19..20: mod_base = OTHER; note = S-phosphorothioate
  modified_base 20: mod_base = um
  modified_base 21: mod_base = um
  modified_base 22: mod_base = OTHER; note = 2-fluororibose cytosine
  modified_base 22..23: mod_base = OTHER; note = S-phosphorothioate
  modified_base 23: mod_base = OTHER; note = deoxyribose thymine
  modified_base 23..24: mod_base = OTHER; note = S-phosphorothioate
  modified_base 24: mod_base = OTHER; note = deoxyribose uracil (position 3 connectivity)
  modified_base 24..25: mod_base = OTHER; note = S-phosphorothioate
  modified_base 25: mod_base = OTHER; note = deoxyribose inosine
  modified_base 25..26: mod_base = OTHER; note S-N-(1,3-dimethylimidazolidin-2-ylidene)phosphoramidate
  modified_base 26: mod_base = um
  modified_base 27: mod_base = OTHER; note = 2-fluororibose cytosine
  modified_base 27..28: mod_base = OTHER; note = S-phosphorothioate
  modified_base 28: mod_base = gm
  modified_base 28..29: mod_base = OTHER; note = S-phosphorothioate
  modified_base 29: mod_base = OTHER; note = 2-O-methylribose adenine
  modified_base 29..30: mod_base = OTHER; note R-N-(1,3-dimethylimidazolidin-2-ylidene)phosphoramidate
  modified_base 30: mod_base = um
  source 1..30: mol_type = other RNA

SEQ ID NO: 505 - RNA, 30 nt, synthetic construct; identical to SEQ ID NO: 273
  misc_feature 1..30: note = Synthetic: WV-47600
  misc_feature 1..30: note = Synthetic: ADR-0100558
  modified_base 1: mod_base = OTHER; note = triantennary GalNAc with C12 linker linked to 6-aminohexanol linked by phosphate to the 5' end of 2-O-methylribose cytosine
  modified_base 1..2: mod_base = OTHER; note R-N-(1,3-dimethylimidazolidin-2-ylidene)phosphoramidate
  modified_base 2: mod_base = cm
  modified_base 2..3: mod_base = OTHER; note = S-phosphorothioate
  modified_base 3: mod_base = cm
  modified_base 3..4: mod_base = OTHER; note = S-phosphorothioate
  modified_base 4: mod_base = OTHER; note = 2-fluororibose adenine
  modified_base 4..5: mod_base = OTHER; note = S-phosphorothioate
  modified_base 5: mod_base = OTHER; note = 2-fluororibose guanine
  modified_base 5..6: mod_base = OTHER; note = S-phosphorothioate
  modified_base 6: mod_base = OTHER; note = 2-fluororibose cytosine
  modified_base 7: mod_base = OTHER; note = 2-O-methylribose adenine
  modified_base 7..8: mod_base = OTHER; note = S-phosphorothioate
  modified_base 8: mod_base = OTHER; note = 2-fluororibose guanine
  modified_base 8..9: mod_base = OTHER; note = S-phosphorothioate
  modified_base 9: mod_base = cm
  modified_base 10: mod_base = um
  modified_base 10..11: mod_base = OTHER; note = S-phosphorothioate
  modified_base 11: mod_base = um
  modified_base 11..12: mod_base = OTHER; note R-N-(1,3-dimethylimidazolidin-2-ylidene)phosphoramidate
  modified_base 12: mod_base = cm
  modified_base 13: mod_base = OTHER; note = 2-fluororibose adenine
  modified_base 13..14: mod_base = OTHER; note = S-phosphorothioate
  modified_base 14: mod_base = OTHER; note = 2-fluororibose guanine
  modified_base 14..15: mod_base = OTHER; note R-N-(1,3-dimethylimidazolidin-2-ylidene)phosphoramidate
  modified_base 15: mod_base = um
  modified_base 16: mod_base = cm
  modified_base 16..17: mod_base = OTHER; note = S-phosphorothioate
  modified_base 17: mod_base = OTHER; note = 2-fluororibose cytosine
  modified_base 17..18: mod_base = OTHER; note = S-phosphorothioate
  modified_base 18: mod_base = OTHER; note = 2-fluororibose cytosine
  modified_base 18..19: mod_base = OTHER; note = S-phosphorothioate
  modified_base 19: mod_base = OTHER; note = 2-fluororibose uracil
  modified_base 19..20: mod_base = OTHER; note R-N-(1,3-dimethylimidazolidin-2-ylidene)phosphoramidate
  modified_base 20: mod_base = um
  modified_base 21: mod_base = um
  modified_base 22: mod_base = OTHER; note = 2-fluororibose cytosine
  modified_base 22..23: mod_base = OTHER; note = S-phosphorothioate
  modified_base 23: mod_base = OTHER; note = deoxyribose thymine
  modified_base 23..24: mod_base = OTHER; note = S-phosphorothioate
  modified_base 24: mod_base = OTHER; note = deoxyribose uracil (position 3 connectivity)
  modified_base 24..25: mod_base = OTHER; note = S-phosphorothioate
  modified_base 25: mod_base = OTHER; note = deoxyribose inosine
  modified_base 25..26: mod_base = OTHER; note S-N-(1,3-dimethylimidazolidin-2-ylidene)phosphoramidate
  modified_base 26: mod_base = um
  modified_base 27: mod_base = OTHER; note = 2-fluororibose cytosine
  modified_base 27..28: mod_base = OTHER; note = S-phosphorothioate
  modified_base 28: mod_base = gm
  modified_base 28..29: mod_base = OTHER; note = S-phosphorothioate
  modified_base 29: mod_base = OTHER; note = 2-O-methylribose adenine
  modified_base 29..30: mod_base = OTHER; note R-N-(1,3-dimethylimidazolidin-2-ylidene)phosphoramidate
  modified_base 30: mod_base = um
  source 1..30: mol_type = other RNA

SEQ ID NO: 506 - RNA, 30 nt, synthetic construct; identical to SEQ ID NO: 273
  misc_feature 1..30: note = Synthetic: WV-47601
  misc_feature 1..30: note = Synthetic: ADR-0100559
  modified_base 1: mod_base = OTHER; note = triantennary GalNAc with C12 linker linked to 6-aminohexanol linked by phosphate to the 5' end of 2-O-methylribose cytosine
  modified_base 1..2: mod_base = OTHER; note R-N-(1,3-dimethylimidazolidin-2-ylidene)phosphoramidate
  modified_base 2: mod_base = cm
  modified_base 2..3: mod_base = OTHER; note = S-phosphorothioate
  modified_base 3: mod_base = cm
  modified_base 3..4: mod_base = OTHER; note = S-phosphorothioate
  modified_base 4: mod_base = OTHER; note = 2-fluororibose adenine
  modified_base 4..5: mod_base = OTHER; note = S-phosphorothioate
  modified_base 5: mod_base = OTHER; note = 2-fluororibose guanine
  modified_base 5..6: mod_base = OTHER; note = S-phosphorothioate
  modified_base 6: mod_base = cm
  modified_base 7: mod_base = OTHER; note = 2-O-methylribose adenine
  modified_base 8: mod_base = OTHER; note = 2-fluororibose guanine
  modified_base 8..9: mod_base = OTHER; note = S-phosphorothioate
  modified_base 9: mod_base = OTHER; note = 2-fluororibose cytosine
  modified_base 9..10: mod_base = OTHER; note = S-phosphorothioate
  modified_base 10: mod_base = um
  modified_base 11: mod_base = um
  modified_base 11..12: mod_base = OTHER; note R-N-(1,3-dimethylimidazolidin-2-ylidene)phosphoramidate
  modified_base 12: mod_base = cm
  modified_base 13: mod_base = OTHER; note = 2-fluororibose adenine
  modified_base 13..14: mod_base = OTHER; note = S-phosphorothioate
  modified_base 14: mod_base = OTHER; note = 2-fluororibose guanine
  modified_base 14..15: mod_base = OTHER; note R-N-(1,3-dimethylimidazolidin-2-ylidene)phosphoramidate
  modified_base 15: mod_base = OTHER; note = 2-fluororibose uracil
  modified_base 16: mod_base = cm
  modified_base 16..17: mod_base = OTHER; note = S-phosphorothioate
  modified_base 17: mod_base = OTHER; note = 2-fluororibose cytosine
  modified_base 17..18: mod_base = OTHER; note = S-phosphorothioate
  modified_base 18: mod_base = cm
  modified_base 19: mod_base = um
  modified_base 19..20: mod_base = OTHER; note R-N-(1,3-dimethylimidazolidin-2-ylidene)phosphoramidate
  modified_base 20: mod_base = um
  modified_base 21: mod_base = um
  modified_base 22: mod_base = OTHER; note = 2-fluororibose cytosine
  modified_base 22..23: mod_base = OTHER; note = S-phosphorothioate
  modified_base 23: mod_base = OTHER; note = deoxyribose thymine
  modified_base 23..24: mod_base = OTHER; note = S-phosphorothioate
  modified_base 24: mod_base = OTHER; note = deoxyribose uracil (position 3 connectivity)
  modified_base 24..25: mod_base = OTHER; note = S-phosphorothioate
  modified_base 25: mod_base = OTHER; note = deoxyribose inosine
  modified_base 25..26: mod_base = OTHER; note S-N-(1,3-dimethylimidazolidin-2-ylidene)phosphoramidate
  modified_base 26: mod_base = um
  modified_base 27: mod_base = OTHER; note = 2-fluororibose cytosine
  modified_base 27..28: mod_base = OTHER; note = S-phosphorothioate
  modified_base 28: mod_base = gm
  modified_base 28..29: mod_base = OTHER; note = S-phosphorothioate
  modified_base 29: mod_base = OTHER; note = 2-O-methylribose adenine
  modified_base 29..30: mod_base = OTHER; note R-N-(1,3-dimethylimidazolidin-2-ylidene)phosphoramidate
  modified_base 30: mod_base = um
  source 1..30: mol_type = other RNA

SEQ ID NO: 507 - RNA, 30 nt, synthetic construct; identical to SEQ ID NO: 273
  misc_feature 1..30: note = Synthetic: WV-47602
  misc_feature 1..30: note = Synthetic: ADR-0100560
  modified_base 1: mod_base = OTHER; note = triantennary GalNAc with C12 linker linked to 6-aminohexanol linked by phosphate to the 5' end of 2-O-methoxyethylribose 5-methyl-cytidine
  modified_base 1..2: mod_base = OTHER; note R-N-(1,3-dimethylimidazolidin-2-ylidene)phosphoramidate
  modified_base 2: mod_base = OTHER; note = 2-O-methoxyethylribose 5-methyl-cytidine
  modified_base 2..3: mod_base = OTHER; note = S-phosphorothioate
  modified_base 3: mod_base = OTHER; note = 2-O-methoxyethylribose 5-methyl-cytidine
  modified_base 3..4: mod_base = OTHER; note = S-phosphorothioate
  modified_base 4: mod_base = OTHER; note = 2-fluororibose adenine
  modified_base 4..5: mod_base = OTHER; note = S-phosphorothioate
  modified_base 5: mod_base = OTHER; note = 2-fluororibose guanine
  modified_base 5..6: mod_base = OTHER; note = S-phosphorothioate
  modified_base 6: mod_base = cm
  modified_base 7: mod_base = OTHER; note = 2-O-methylribose adenine
  modified_base 7..8: mod_base = OTHER; note = S-phosphorothioate
  modified_base 8: mod_base = OTHER; note = 2-fluororibose guanine
  modified_base 8..9: mod_base = OTHER; note = S-phosphorothioate
  modified_base 9: mod_base = OTHER; note = 2-fluororibose cytosine
  modified_base 10: mod_base = um
  modified_base 10..11: mod_base = OTHER; note = S-phosphorothioate
  modified_base 11: mod_base = OTHER; note = 2-fluororibose uracil
  modified_base 11..12: mod_base = OTHER; note R-N-(1,3-dimethylimidazolidin-2-ylidene)phosphoramidate
  modified_base 12: mod_base = cm
  modified_base 13: mod_base = OTHER; note = 2-fluororibose adenine
  modified_base 13..14: mod_base = OTHER; note = S-phosphorothioate
  modified_base 14: mod_base = OTHER; note = 2-fluororibose guanine
  modified_base 14..15: mod_base = OTHER; note R-N-(1,3-dimethylimidazolidin-2-ylidene)phosphoramidate
  modified_base 15: mod_base = OTHER; note = 2-fluororibose uracil
  modified_base 16: mod_base = cm
  modified_base 16..17: mod_base = OTHER; note = S-phosphorothioate
  modified_base 17: mod_base = OTHER; note = 2-fluororibose cytosine
  modified_base 17..18: mod_base = OTHER; note = S-phosphorothioate
  modified_base 18: mod_base = OTHER; note = 2-fluororibose cytosine
  modified_base 18..19: mod_base = OTHER; note = S-phosphorothioate
  modified_base 19: mod_base = OTHER; note = 2-fluororibose uracil
  modified_base 19..20: mod_base = OTHER; note = S-phosphorothioate
  modified_base 20: mod_base = um
  modified_base 21: mod_base = um
  modified_base 22: mod_base = OTHER; note = 2-fluororibose cytosine
  modified_base 22..23: mod_base = OTHER; note = S-phosphorothioate
  modified_base 23: mod_base = OTHER; note = deoxyribose thymine
  modified_base 23..24: mod_base = OTHER; note = S-phosphorothioate
  modified_base 24: mod_base = OTHER; note = deoxyribose uracil (position 3 connectivity)
  modified_base 24..25: mod_base = OTHER; note = S-phosphorothioate
  modified_base 25: mod_base = OTHER; note = deoxyribose inosine
  modified_base 25..26: mod_base = OTHER; note S-N-(1,3-dimethylimidazolidin-2-ylidene)phosphoramidate
  modified_base 26: mod_base = um
  modified_base 27: mod_base = OTHER; note = 2-fluororibose cytosine
  modified_base 27..28: mod_base = OTHER; note = S-phosphorothioate
  modified_base 28: mod_base = gm
  modified_base 28..29: mod_base = OTHER; note = S-phosphorothioate
  modified_base 29: mod_base = OTHER; note = 2-O-methoxyethylribose adenine
  modified_base 29..30: mod_base = OTHER; note R-N-(1,3-dimethylimidazolidin-2-ylidene)phosphoramidate
  modified_base 30: mod_base = OTHER; note = 2-O-methoxyethylribose thymine
  source 1..30: mol_type = other RNA

SEQ ID NO: 508 - RNA, 30 nt, synthetic construct; identical to SEQ ID NO: 273
  misc_feature 1..30: note = Synthetic: WV-47603
  misc_feature 1..30: note = Synthetic: ADR-0100561
  modified_base 1: mod_base = OTHER; note = triantennary GalNAc with C12 linker linked to 6-aminohexanol linked by phosphate to the 5' end of 2-O-methylribose cytosine
  modified_base 1..2: mod_base = OTHER; note R-N-(1,3-dimethylimidazolidin-2-ylidene)phosphoramidate
  modified_base 2: mod_base = cm
  modified_base 2..3: mod_base = OTHER; note = S-phosphorothioate
  modified_base 3: mod_base = cm
  modified_base 3..4: mod_base = OTHER; note = S-phosphorothioate
  modified_base 4: mod_base = OTHER; note = 2-fluororibose adenine
  modified_base 4..5: mod_base = OTHER; note = S-phosphorothioate
  modified_base 5: mod_base = OTHER; note = 2-fluororibose guanine
  modified_base 5..6: mod_base = OTHER; note = S-phosphorothioate
  modified_base 6: mod_base = OTHER; note = 2-O-methoxyethylribose 5-methyl-cytidine
  modified_base 7: mod_base = OTHER; note = 2-O-methylribose adenine
  modified_base 7..8: mod_base = OTHER; note = S-phosphorothioate
  modified_base 8: mod_base = OTHER; note = 2-fluororibose guanine
  modified_base 8..9: mod_base = OTHER; note = S-phosphorothioate
  modified_base 9: mod_base = OTHER; note = 2-fluororibose cytosine
  modified_base 10: mod_base = OTHER; note = 2-O-methoxyethylribose thymine
  modified_base 10..11: mod_base = OTHER; note = S-phosphorothioate
  modified_base 11: mod_base = OTHER; note = 2-fluororibose uracil
  modified_base 11..12: mod_base = OTHER; note R-N-(1,3-dimethylimidazolidin-2-ylidene)phosphoramidate
  modified_base 12: mod_base = cm
  modified_base 13: mod_base = OTHER; note = 2-fluororibose adenine
  modified_base 13..14: mod_base = OTHER; note = S-phosphorothioate
  modified_base 14: mod_base = OTHER; note = 2-fluororibose guanine
  modified_base 14..15: mod_base = OTHER; note R-N-(1,3-dimethylimidazolidin-2-ylidene)phosphoramidate
  modified_base 15: mod_base = OTHER; note = 2-fluororibose uracil
  modified_base 16: mod_base = cm
  modified_base 16..17: mod_base = OTHER; note = S-phosphorothioate
  modified_base 17: mod_base = OTHER; note = 2-fluororibose cytosine
  modified_base 17..18: mod_base = OTHER; note = S-phosphorothioate
  modified_base 18: mod_base = OTHER; note = 2-fluororibose cytosine
  modified_base 18..19: mod_base = OTHER; note = S-phosphorothioate
  modified_base 19: mod_base = OTHER; note = 2-fluororibose uracil
  modified_base 19..20: mod_base = OTHER; note = S-phosphorothioate
  modified_base 20: mod_base = um
  modified_base 21: mod_base = OTHER; note = 2-O-methoxyethylribose thymine
  modified_base 22: mod_base = OTHER; note = 2-fluororibose cytosine
  modified_base 22..23: mod_base = OTHER; note = S-phosphorothioate
  modified_base 23: mod_base = OTHER; note = deoxyribose thymine
  modified_base 23..24: mod_base = OTHER; note = S-phosphorothioate
  modified_base 24: mod_base = OTHER; note = deoxyribose uracil (position 3 connectivity)
  modified_base 24..25: mod_base = OTHER; note = S-phosphorothioate
  modified_base 25: mod_base = OTHER; note = deoxyribose inosine
  modified_base 25..26: mod_base = OTHER; note S-N-(1,3-dimethylimidazolidin-2-ylidene)phosphoramidate
  modified_base 26: mod_base = um
  modified_base 27: mod_base = OTHER; note = 2-fluororibose cytosine
  modified_base 27..28: mod_base = OTHER; note = S-phosphorothioate
  modified_base 28: mod_base = gm
  modified_base 28..29: mod_base = OTHER; note = S-phosphorothioate
  modified_base 29: mod_base = OTHER; note = 2-O-methylribose adenine
  modified_base 29..30: mod_base = OTHER; note R-N-(1,3-dimethylimidazolidin-2-ylidene)phosphoramidate
  modified_base 30: mod_base = um
  source 1..30: mol_type = other RNA

SEQ ID NO: 509 - RNA, 30 nt, synthetic construct; identical to SEQ ID NO: 273
  misc_feature 1..30: note = Synthetic: WV-47604
  misc_feature 1..30: note = Synthetic: ADR-0100562
  modified_base 1: mod_base = OTHER; note = triantennary GalNAc with C12 linker linked to 6-aminohexanol linked by phosphate to the 5' end of 2-O-methylribose cytosine
  modified_base 1..2: mod_base = OTHER; note R-N-(1,3-dimethylimidazolidin-2-ylidene)phosphoramidate
  modified_base 2: mod_base = cm
  modified_base 2..3: mod_base = OTHER; note = S-phosphorothioate
  modified_base 3: mod_base = cm
  modified_base 3..4: mod_base = OTHER; note = S-phosphorothioate
  modified_base 4: mod_base = OTHER; note = 2-fluororibose adenine
  modified_base 4..5: mod_base = OTHER; note = S-phosphorothioate
  modified_base 5: mod_base = OTHER; note = 2-fluororibose guanine
  modified_base 5..6: mod_base = OTHER; note = S-phosphorothioate
  modified_base 6: mod_base = OTHER; note = 2-O-methoxyethylribose 5-methyl-cytidine
  modified_base 7: mod_base = OTHER; note = 2-O-methylribose adenine
  modified_base 7..8: mod_base = OTHER; note = S-phosphorothioate
  modified_base 8: mod_base = OTHER; note = 2-fluororibose guanine
  modified_base 8..9: mod_base = OTHER; note = S-phosphorothioate
  modified_base 9: mod_base = OTHER; note = 2-fluororibose cytosine
  modified_base 10: mod_base = OTHER; note = 2-O-methoxyethylribose thymine
  modified_base 10..11: mod_base = OTHER; note = S-phosphorothioate
  modified_base 11: mod_base = OTHER; note = 2-fluororibose uracil
  modified_base 11..12: mod_base = OTHER; note R-N-(1,3-dimethylimidazolidin-2-ylidene)phosphoramidate
  modified_base 12: mod_base = cm
  modified_base 13: mod_base = OTHER; note = 2-fluororibose adenine
  modified_base 13..14: mod_base = OTHER; note = S-phosphorothioate
  modified_base 14: mod_base = OTHER; note = 2-fluororibose guanine
  modified_base 14..15: mod_base = OTHER; note R-N-(1,3-dimethylimidazolidin-2-ylidene)phosphoramidate
  modified_base 15: mod_base = OTHER; note = 2-fluororibose uracil
  modified_base 16: mod_base = cm
  modified_base 16..17: mod_base = OTHER; note = S-phosphorothioate
  modified_base 17: mod_base = OTHER; note = 2-fluororibose cytosine
  modified_base 17..18: mod_base = OTHER; note = S-phosphorothioate
  modified_base 18: mod_base = OTHER; note = 2-fluororibose cytosine
  modified_base 18..19: mod_base = OTHER; note = S-phosphorothioate
  modified_base 19: mod_base = OTHER; note = 2-fluororibose uracil
  modified_base 19..20: mod_base = OTHER; note = S-phosphorothioate
  modified_base 20: mod_base = OTHER; note = 2-O-methoxyethylribose thymine
  modified_base 21: mod_base = OTHER; note = 2-O-methoxyethylribose thymine
  modified_base 22: mod_base = OTHER; note = 2-fluororibose cytosine
  modified_base 22..23: mod_base = OTHER; note = S-phosphorothioate
  modified_base 23: mod_base = OTHER; note = deoxyribose thymine
  modified_base 23..24: mod_base = OTHER; note = S-phosphorothioate
  modified_base 24: mod_base = OTHER; note = deoxyribose uracil (position 3 connectivity)
  modified_base 24..25: mod_base = OTHER; note = S-phosphorothioate
  modified_base 25: mod_base = OTHER; note = deoxyribose inosine
  modified_base 25..26: mod_base = OTHER; note S-N-(1,3-dimethylimidazolidin-2-ylidene)phosphoramidate
  modified_base 26: mod_base = um
  modified_base 27: mod_base = OTHER; note = 2-fluororibose cytosine
  modified_base 27..28: mod_base = OTHER; note = S-phosphorothioate
  modified_base 28: mod_base = gm
  modified_base 28..29: mod_base = OTHER; note = S-phosphorothioate
  modified_base 29: mod_base = OTHER; note = 2-O-methylribose adenine
  modified_base 29..30: mod_base = OTHER; note R-N-(1,3-dimethylimidazolidin-2-ylidene)phosphoramidate
  modified_base 30: mod_base = um
  source 1..30: mol_type = other RNA

SEQ ID NO: 510 - RNA, 30 nt, synthetic construct; identical to SEQ ID NO: 273
  misc_feature 1..30: note = Synthetic: WV-47605
  misc_feature 1..30: note = Synthetic: ADR-0100563
  modified_base 1: mod_base = OTHER; note = triantennary GalNAc with C12 linker linked to 6-aminohexanol linked by phosphate to the 5' end of 2-O-methylribose cytosine
  modified_base 1..2: mod_base = OTHER; note R-N-(1,3-dimethylimidazolidin-2-ylidene)phosphoramidate
  modified_base 2: mod_base = cm
  modified_base 2..3: mod_base = OTHER; note = S-phosphorothioate
  modified_base 3: mod_base = cm
  modified_base 3..4: mod_base = OTHER; note = S-phosphorothioate
  modified_base 4: mod_base = OTHER; note = 2-fluororibose adenine
  modified_base 4..5: mod_base = OTHER; note = S-phosphorothioate
  modified_base 5: mod_base = OTHER; note = 2-fluororibose guanine
  modified_base 5..6: mod_base = OTHER; note = S-phosphorothioate
  modified_base 6: mod_base = OTHER; note = 2-O-methoxyethylribose 5-methyl-cytidine
  modified_base 7: mod_base = OTHER; note = 2-O-methylribose adenine
  modified_base 8: mod_base = OTHER; note = 2-fluororibose guanine
  modified_base 8..9: mod_base = OTHER; note = S-phosphorothioate
  modified_base 9: mod_base = OTHER; note = 2-fluororibose cytosine
  modified_base 9..10: mod_base = OTHER; note = S-phosphorothioate
  modified_base 10: mod_base = OTHER; note = 2-O-methoxyethylribose thymine
  modified_base 11: mod_base = OTHER; note = 2-fluororibose uracil
  modified_base 11..12: mod_base = OTHER; note R-N-(1,3-dimethylimidazolidin-2-ylidene)phosphoramidate
  modified_base 12: mod_base = cm
  modified_base 13: mod_base = OTHER; note = 2-fluororibose adenine
  modified_base 13..14: mod_base = OTHER; note = S-phosphorothioate
  modified_base 14: mod_base = OTHER; note = 2-fluororibose guanine
  modified_base 14..15: mod_base = OTHER; note R-N-(1,3-dimethylimidazolidin-2-ylidene)phosphoramidate
  modified_base 15: mod_base = OTHER; note = 2-fluororibose uracil
  modified_base 16: mod_base = cm
  modified_base 16..17: mod_base = OTHER; note = S-phosphorothioate
  modified_base 17: mod_base = OTHER; note = 2-fluororibose cytosine
  modified_base 17..18: mod_base = OTHER; note = S-phosphorothioate
  modified_base 18: mod_base = OTHER; note = 2-fluororibose cytosine
  modified_base 18..19: mod_base = OTHER; note = S-phosphorothioate
  modified_base 19: mod_base = OTHER; note = 2-fluororibose uracil
  modified_base 19..20: mod_base = OTHER; note R-N-(1,3-dimethylimidazolidin-2-ylidene)phosphoramidate
  modified_base 20: mod_base = um
  modified_base 21: mod_base = OTHER; note = 2-O-methoxyethylribose thymine
  modified_base 22: mod_base = OTHER; note = 2-fluororibose cytosine
  modified_base 22..23: mod_base = OTHER; note = S-phosphorothioate
  modified_base 23: mod_base = OTHER; note = deoxyribose thymine
  modified_base 23..24: mod_base = OTHER; note = S-phosphorothioate
  modified_base 24: mod_base = OTHER; note = deoxyribose uracil (position 3 connectivity)
  modified_base 24..25: mod_base = OTHER; note = S-phosphorothioate
  modified_base 25: mod_base = OTHER; note = deoxyribose inosine
  modified_base 25..26: mod_base = OTHER; note S-N-(1,3-dimethylimidazolidin-2-ylidene)phosphoramidate
  modified_base 26: mod_base = um
  modified_base 27: mod_base = OTHER; note = 2-fluororibose cytosine
  modified_base 27..28: mod_base = OTHER; note = S-phosphorothioate
  modified_base 28: mod_base = gm
  modified_base 28..29: mod_base = OTHER; note = S-phosphorothioate
  modified_base 29: mod_base = OTHER; note = 2-O-methylribose adenine
  modified_base 29..30: mod_base = OTHER; note R-N-(1,3-dimethylimidazolidin-2-ylidene)phosphoramidate
  modified_base 30: mod_base = um
  source 1..30: mol_type = other RNA

SEQ ID NO: 511 - RNA, 30 nt, synthetic construct; identical to SEQ ID NO: 273
  misc_feature 1..30: note = Synthetic: WV-47606
  misc_feature 1..30: note = Synthetic: ADR-0100564
  modified_base 1: mod_base = OTHER; note = triantennary GalNAc with C12 linker linked to 6-aminohexanol linked by phosphate to the 5' end of 2-O-methylribose cytosine
  modified_base 1..2: mod_base = OTHER; note R-N-(1,3-dimethylimidazolidin-2-ylidene)phosphoramidate
  modified_base 2: mod_base = cm
  modified_base 2..3: mod_base = OTHER; note = S-phosphorothioate
  modified_base 3: mod_base = cm
  modified_base 3..4: mod_base = OTHER; note = S-phosphorothioate
  modified_base 4: mod_base = OTHER; note = 2-fluororibose adenine
  modified_base 4..5: mod_base = OTHER; note = S-phosphorothioate
  modified_base 5: mod_base = OTHER; note = 2-fluororibose guanine
  modified_base 5..6: mod_base = OTHER; note = S-phosphorothioate
  modified_base 6: mod_base = OTHER; note = 2-O-methoxyethylribose 5-methyl-cytidine
  modified_base 7: mod_base = OTHER; note = 2-O-methoxyethylribose adenine
  modified_base 8: mod_base = OTHER; note = 2-fluororibose guanine
  modified_base 8..9: mod_base = OTHER; note = S-phosphorothioate
  modified_base 9: mod_base = OTHER; note = 2-fluororibose cytosine
  modified_base 9..10: mod_base = OTHER; note = S-phosphorothioate
  modified_base 10: mod_base = OTHER; note = 2-O-methoxyethylribose thymine
  modified_base 11: mod_base = OTHER; note = 2-fluororibose uracil
  modified_base 11..12: mod_base = OTHER; note R-N-(1,3-dimethylimidazolidin-2-ylidene)phosphoramidate
  modified_base 12: mod_base = cm
  modified_base 13: mod_base = OTHER; note = 2-fluororibose adenine
  modified_base 13..14: mod_base = OTHER; note = S-phosphorothioate
  modified_base 14: mod_base = OTHER; note = 2-fluororibose guanine
  modified_base 14..15: mod_base = OTHER; note R-N-(1,3-dimethylimidazolidin-2-ylidene)phosphoramidate
  modified_base 15: mod_base = OTHER; note = 2-fluororibose uracil
  modified_base 16: mod_base = cm
  modified_base 16..17: mod_base = OTHER; note = S-phosphorothioate
  modified_base 17: mod_base = OTHER; note = 2-fluororibose cytosine
  modified_base 17..18: mod_base = OTHER; note = S-phosphorothioate
  modified_base 18: mod_base = OTHER; note = 2-fluororibose cytosine
  modified_base 18..19: mod_base = OTHER; note = S-phosphorothioate
  modified_base 19: mod_base = OTHER; note = 2-fluororibose uracil
  modified_base 19..20: mod_base = OTHER; note R-N-(1,3-dimethylimidazolidin-2-ylidene)phosphoramidate
  modified_base 20: mod_base = OTHER; note = 2-O-methoxyethylribose thymine
  modified_base 21: mod_base = OTHER; note = 2-O-methoxyethylribose thymine
  modified_base 22: mod_base = OTHER; note = 2-fluororibose cytosine
  modified_base 22..23: mod_base = OTHER; note = S-phosphorothioate
  modified_base 23: mod_base = OTHER; note = deoxyribose thymine
  modified_base 23..24: mod_base = OTHER; note = S-phosphorothioate
  modified_base 24: mod_base = OTHER; note = deoxyribose uracil (position 3 connectivity)
  modified_base 24..25: mod_base = OTHER; note = S-phosphorothioate
  modified_base 25: mod_base = OTHER; note = deoxyribose inosine
  modified_base 25..26: mod_base = OTHER; note S-N-(1,3-dimethylimidazolidin-2-ylidene)phosphoramidate
  modified_base 26: mod_base = um
  modified_base 27: mod_base = OTHER; note = 2-fluororibose cytosine
  modified_base 27..28: mod_base = OTHER; note = S-phosphorothioate
  modified_base 28: mod_base = gm
  modified_base 28..29: mod_base = OTHER; note = S-phosphorothioate
  modified_base 29: mod_base = OTHER; note = 2-O-methylribose adenine
  modified_base 29..30: mod_base = OTHER; note R-N-(1,3-dimethylimidazolidin-2-ylidene)phosphoramidate
  modified_base 30: mod_base = um
  source 1..30: mol_type = other RNA

SEQ ID NO: 512 - RNA, 30 nt, synthetic construct; identical to SEQ ID NO: 273
  misc_feature 1..30: note = Synthetic: WV-47607
  misc_feature 1..30: note = Synthetic: ADR-0100565
  modified_base 1: mod_base = OTHER; note = triantennary GalNAc with C12 linker linked to 6-aminohexanol linked by phosphate to the 5' end of 2-O-methylribose cytosine
  modified_base 1..2: mod_base = OTHER; note R-N-(1,3-dimethylimidazolidin-2-ylidene)phosphoramidate
  modified_base 2: mod_base = cm
  modified_base 2..3: mod_base = OTHER; note = S-phosphorothioate
  modified_base 3: mod_base = cm
  modified_base 3..4: mod_base = OTHER; note = S-phosphorothioate
  modified_base 4: mod_base = OTHER; note = 2-fluororibose adenine
  modified_base 4..5: mod_base = OTHER; note = S-phosphorothioate
  modified_base 5: mod_base = OTHER; note = 2-fluororibose guanine
  modified_base 5..6: mod_base = OTHER; note = S-phosphorothioate
  modified_base 6: mod_base = cm
  modified_base 7: mod_base = OTHER; note = 2-O-methylribose adenine
  modified_base 7..8: mod_base = OTHER; note = S-phosphorothioate
  modified_base 8: mod_base = OTHER; note = 2-fluororibose guanine
  modified_base 8..9: mod_base = OTHER; note = S-phosphorothioate
  modified_base 9: mod_base = OTHER; note = 2-fluororibose cytosine
  modified_base 10: mod_base = um
  modified_base 10..11: mod_base = OTHER; note = S-phosphorothioate
  modified_base 11: mod_base = OTHER; note = 2-fluororibose uracil
  modified_base 11..12: mod_base = OTHER; note R-N-(1,3-dimethylimidazolidin-2-ylidene)phosphoramidate
  modified_base 12: mod_base = cm
  modified_base 13: mod_base = OTHER; note = 2-fluororibose adenine
  modified_base 13..14: mod_base = OTHER; note = S-phosphorothioate
  modified_base 14: mod_base = gm
  modified_base 14..15: mod_base = OTHER; note R-N-(1,3-dimethylimidazolidin-2-ylidene)phosphoramidate
  modified_base 15: mod_base = OTHER; note = 2-fluororibose uracil
  modified_base 16: mod_base = cm
  modified_base 16..17: mod_base = OTHER; note = S-phosphorothioate
  modified_base 17: mod_base = OTHER; note = 2-fluororibose cytosine
  modified_base 17..18: mod_base = OTHER; note = S-phosphorothioate
  modified_base 18: mod_base = OTHER; note = 2-fluororibose cytosine
  modified_base 18..19: mod_base = OTHER; note = S-phosphorothioate
  modified_base 19: mod_base = OTHER; note = 2-fluororibose uracil
  modified_base 19..20: mod_base = OTHER; note = S-phosphorothioate
  modified_base 20: mod_base = um
  modified_base 21: mod_base = um
  modified_base 22: mod_base = OTHER; note = 2-fluororibose cytosine
  modified_base 22..23: mod_base = OTHER; note = S-phosphorothioate
  modified_base 23: mod_base = OTHER; note = deoxyribose thymine
  modified_base 23..24: mod_base = OTHER; note = S-phosphorothioate
  modified_base 24: mod_base = OTHER; note = deoxyribose uracil (position 3 connectivity)
  modified_base 24..25: mod_base = OTHER; note = S-phosphorothioate
  modified_base 25: mod_base = OTHER; note = deoxyribose inosine
  modified_base 25..26: mod_base = OTHER; note S-N-(1,3-dimethylimidazolidin-2-ylidene)phosphoramidate
  modified_base 26: mod_base = um
  modified_base 27: mod_base = OTHER; note = 2-fluororibose cytosine
  modified_base 27..28: mod_base = OTHER; note = S-phosphorothioate
  modified_base 28: mod_base = gm
  modified_base 28..29: mod_base = OTHER; note = S-phosphorothioate
  modified_base 29: mod_base = OTHER; note = 2-O-methylribose adenine
  modified_base 29..30: mod_base = OTHER; note R-N-(1,3-dimethylimidazolidin-2-ylidene)phosphoramidate
  modified_base 30: mod_base = um
  source 1..30: mol_type = other RNA

SEQ ID NO: 513 - RNA, 30 nt, synthetic construct; identical to SEQ ID NO: 273
  misc_feature 1..30: note = Synthetic: WV-47608
  misc_feature 1..30: note = Synthetic: ADR-0100566
  modified_base 1: mod_base = OTHER; note = triantennary GalNAc with C12 linker linked to 6-aminohexanol linked by phosphate to the 5' end of 2-O-methylribose cytosine
  modified_base 1..2: mod_base = OTHER; note R-N-(1,3-dimethylimidazolidin-2-ylidene)phosphoramidate
  modified_base 2: mod_base = cm
  modified_base 2..3: mod_base = OTHER; note = S-phosphorothioate
  modified_base 3: mod_base = cm
  modified_base 3..4: mod_base = OTHER; note = S-phosphorothioate
  modified_base 4: mod_base = OTHER; note = 2-fluororibose adenine
  modified_base 4..5: mod_base = OTHER; note = S-phosphorothioate
  modified_base 5: mod_base = OTHER; note = 2-fluororibose guanine
  modified_base 5..6: mod_base = OTHER; note = S-phosphorothioate
  modified_base 6: mod_base = cm
  modified_base 7: mod_base = OTHER; note = 2-O-methylribose adenine
  modified_base 8: mod_base = OTHER; note = 2-fluororibose guanine
  modified_base 8..9: mod_base = OTHER; note = S-phosphorothioate
  modified_base 9: mod_base = OTHER; note = 2-fluororibose cytosine
  modified_base 9..10: mod_base = OTHER; note = S-phosphorothioate
  modified_base 10: mod_base = um
  modified_base 11: mod_base = OTHER; note = 2-fluororibose uracil
  modified_base 11..12: mod_base = OTHER; note R-N-(1,3-dimethylimidazolidin-2-ylidene)phosphoramidate
  modified_base 12: mod_base = cm
  modified_base 13: mod_base = OTHER; note = 2-fluororibose adenine
  modified_base 13..14: mod_base = OTHER; note = S-phosphorothioate
  modified_base 14: mod_base = gm
  modified_base 14..15: mod_base = OTHER; note R-N-(1,3-dimethylimidazolidin-2-ylidene)phosphoramidate
  modified_base 15: mod_base = OTHER; note = 2-fluororibose uracil
  modified_base 16: mod_base = cm
  modified_base 16..17: mod_base = OTHER; note = S-phosphorothioate
  modified_base 17: mod_base = OTHER; note = 2-fluororibose cytosine
  modified_base 17..18: mod_base = OTHER; note = S-phosphorothioate
  modified_base 18: mod_base = OTHER; note = 2-fluororibose cytosine
  modified_base 18..19: mod_base = OTHER; note = S-phosphorothioate
  modified_base 19: mod_base = OTHER; note = 2-fluororibose uracil
  modified_base 19..20: mod_base = OTHER; note R-N-(1,3-dimethylimidazolidin-2-ylidene)phosphoramidate
  modified_base 20: mod_base = um
  modified_base 21: mod_base = um
  modified_base 22: mod_base = OTHER; note = 2-fluororibose cytosine
  modified_base 22..23: mod_base = OTHER; note = S-phosphorothioate
  modified_base 23: mod_base = OTHER; note = deoxyribose thymine
  modified_base 23..24: mod_base = OTHER; note = S-phosphorothioate
  modified_base 24: mod_base = OTHER; note = deoxyribose uracil (position 3 connectivity)
  modified_base 24..25: mod_base = OTHER; note = S-phosphorothioate
  modified_base 25: mod_base = OTHER; note = deoxyribose inosine
  modified_base 25..26: mod_base = OTHER; note S-N-(1,3-dimethylimidazolidin-2-ylidene)phosphoramidate
  modified_base 26: mod_base = um
  modified_base 27: mod_base = OTHER; note = 2-fluororibose cytosine
  modified_base 27..28: mod_base = OTHER; note = S-phosphorothioate
  modified_base 28: mod_base = gm
  modified_base 28..29: mod_base = OTHER; note = S-phosphorothioate
  modified_base 29: mod_base = OTHER; note = 2-O-methylribose adenine
  modified_base 29..30: mod_base = OTHER; note R-N-(1,3-dimethylimidazolidin-2-ylidene)phosphoramidate
  modified_base 30: mod_base = um
  source 1..30: mol_type = other RNA

SEQ ID NO: 514 - RNA, 30 nt, synthetic construct; identical to SEQ ID NO: 273
  misc_feature 1..30: note = Synthetic: WV-47609
  misc_feature 1..30: note = Synthetic: ADR-0100567
  modified_base 1: mod_base = OTHER; note = triantennary GalNAc with C12 linker linked to 6-aminohexanol linked by phosphate to the 5' end of 2-O-methylribose cytosine
  modified_base 1..2: mod_base = OTHER; note R-N-(1,3-dimethylimidazolidin-2-ylidene)phosphoramidate
  modified_base 2: mod_base = cm
  modified_base 2..3: mod_base = OTHER; note = S-phosphorothioate
  modified_base 3: mod_base = cm
  modified_base 3..4: mod_base = OTHER; note = S-phosphorothioate
  modified_base 4: mod_base = OTHER; note = 2-fluororibose adenine
  modified_base 4..5: mod_base = OTHER; note = S-phosphorothioate
  modified_base 5: mod_base = OTHER; note = 2-fluororibose guanine
  modified_base 5..6: mod_base = OTHER; note = S-phosphorothioate
  modified_base 6: mod_base = OTHER; note = 2-O-methoxyethylribose 5-methyl-cytidine
  modified_base 7: mod_base = OTHER; note = 2-O-methylribose adenine
  modified_base 7..8: mod_base = OTHER; note = S-phosphorothioate
  modified_base 8: mod_base = OTHER; note = 2-fluororibose guanine
  modified_base 8..9: mod_base = OTHER; note = S-phosphorothioate
  modified_base 9: mod_base = OTHER; note = 2-fluororibose cytosine
  modified_base 10: mod_base = OTHER; note = 2-O-methoxyethylribose thymine
  modified_base 10..11: mod_base = OTHER; note = S-phosphorothioate
  modified_base 11: mod_base = OTHER; note = 2-fluororibose uracil
  modified_base 11..12: mod_base = OTHER; note R-N-(1,3-dimethylimidazolidin-2-ylidene)phosphoramidate
  modified_base 12: mod_base = cm
  modified_base 13: mod_base = OTHER; note = 2-fluororibose adenine
  modified_base 13..14: mod_base = OTHER; note = S-phosphorothioate
  modified_base 14: mod_base = OTHER; note = 2-fluororibose guanine
  modified_base 14..15: mod_base = OTHER; note R-N-(1,3-dimethylimidazolidin-2-ylidene)phosphoramidate
  modified_base 15: mod_base = OTHER; note = 2-fluororibose uracil
  modified_base 16: mod_base = cm
  modified_base 16..17: mod_base = OTHER; note = S-phosphorothioate
  modified_base 17: mod_base = OTHER; note = 2-fluororibose cytosine
  modified_base 17..18: mod_base = OTHER; note = S-phosphorothioate
  modified_base 18: mod_base = OTHER; note = 2-fluororibose cytosine
  modified_base 18..19: mod_base = OTHER; note = S-phosphorothioate
  modified_base 19: mod_base = OTHER; note = 2-fluororibose uracil
  modified_base 19..20: mod_base = OTHER; note R-N-(1,3-dimethylimidazolidin-2-ylidene)phosphoramidate
  modified_base 20: mod_base = um
  modified_base 20..21: mod_base = OTHER; note = S-phosphorothioate
  modified_base 21: mod_base = OTHER; note = 2-O-methoxyethylribose thymine
  modified_base 22: mod_base = OTHER; note = 2-fluororibose cytosine
  modified_base 22..23: mod_base = OTHER; note = S-phosphorothioate
  modified_base 23: mod_base = OTHER; note = deoxyribose thymine
  modified_base 23..24: mod_base = OTHER; note = S-phosphorothioate
  modified_base 24: mod_base = OTHER; note = deoxyribose uracil (position 3 connectivity)
  modified_base 24..25: mod_base = OTHER; note = S-phosphorothioate
  modified_base 25: mod_base = OTHER; note = deoxyribose inosine
  modified_base 25..26: mod_base = OTHER; note S-N-(1,3-dimethylimidazolidin-2-ylidene)phosphoramidate
  modified_base 26: mod_base = um
  modified_base 27: mod_base = OTHER; note = 2-fluororibose cytosine
  modified_base 27..28: mod_base = OTHER; note = S-phosphorothioate
  modified_base 28: mod_base = gm
  modified_base 28..29: mod_base = OTHER; note = S-phosphorothioate
  modified_base 29: mod_base = OTHER; note = 2-O-methylribose adenine
  modified_base 29..30: mod_base = OTHER; note R-N-(1,3-dimethylimidazolidin-2-ylidene)phosphoramidate
  modified_base 30: mod_base = um
  source 1..30: mol_type = other RNA

SEQ ID NO: 515 - RNA, 30 nt, synthetic construct; identical to SEQ ID NO: 273
  misc_feature 1..30: note = Synthetic: WV-47610
  misc_feature 1..30: note = Synthetic: ADR-0104247
  modified_base 1: mod_base = cm
  modified_base 1..2: mod_base = OTHER; note R-N-(1,3-dimethylimidazolidin-2-ylidene)phosphoramidate
  modified_base 2: mod_base = cm
  modified_base 2..3: mod_base = OTHER; note = S-phosphorothioate
  modified_base 3: mod_base = cm
  modified_base 3..4: mod_base = OTHER; note = S-phosphorothioate
  modified_base 4: mod_base = OTHER; note = 2-fluororibose adenine
  modified_base 4..5: mod_base = OTHER; note = S-phosphorothioate
  modified_base 5: mod_base = OTHER; note = 2-fluororibose guanine
  modified_base 5..6: mod_base = OTHER; note = S-phosphorothioate
  modified_base 6: mod_base = cm
  modified_base 7: mod_base = OTHER; note = 2-O-methylribose adenine
  modified_base 7..8: mod_base = OTHER; note = S-phosphorothioate
  modified_base 8: mod_base = OTHER; note = 2-fluororibose guanine
  modified_base 8..9: mod_base = OTHER; note = S-phosphorothioate
  modified_base 9: mod_base = OTHER; note = 2-fluororibose cytosine
  modified_base 10: mod_base = um
  modified_base 10..11: mod_base = OTHER; note = S-phosphorothioate
  modified_base 11: mod_base = OTHER; note = 2-fluororibose uracil
  modified_base 11..12: mod_base = OTHER; note R-N-(1,3-dimethylimidazolidin-2-ylidene)phosphoramidate
  modified_base 12: mod_base = cm
  modified_base 13: mod_base = OTHER; note = 2-fluororibose adenine
  modified_base 13..14: mod_base = OTHER; note = S-phosphorothioate
  modified_base 14: mod_base = gm
  modified_base 14..15: mod_base = OTHER; note R-N-(1,3-dimethylimidazolidin-2-ylidene)phosphoramidate
  modified_base 15: mod_base = OTHER; note = 2-fluororibose uracil
  modified_base 16: mod_base = cm
  modified_base 17: mod_base = cm
  modified_base 17..18: mod_base = OTHER; note = S-phosphorothioate
  modified_base 18: mod_base = OTHER; note = 2-fluororibose cytosine
  modified_base 18..19: mod_base = OTHER; note = S-phosphorothioate
  modified_base 19: mod_base = OTHER; note = 2-fluororibose uracil
  modified_base 19..20: mod_base = OTHER; note = S-phosphorothioate
  modified_base 20: mod_base = um
  modified_base 21: mod_base = um
  modified_base 22: mod_base = OTHER; note = 2-fluororibose cytosine
  modified_base 22..23: mod_base = OTHER; note = S-phosphorothioate
  modified_base 23: mod_base = OTHER; note = deoxyribose thymine
  modified_base 23..24: mod_base = OTHER; note = S-phosphorothioate
  modified_base 24: mod_base = OTHER; note = deoxyribose uracil (position 3 connectivity)
  modified_base 24..25: mod_base = OTHER; note = S-phosphorothioate
  modified_base 25: mod_base = OTHER; note = deoxyribose inosine
  modified_base 25..26: mod_base = OTHER; note S-N-(1,3-dimethylimidazolidin-2-ylidene)phosphoramidate
  modified_base 26: mod_base = um
  modified_base 27: mod_base = OTHER; note = 2-fluororibose cytosine
  modified_base 27..28: mod_base = OTHER; note = S-phosphorothioate
  modified_base 28: mod_base = gm
  modified_base 28..29: mod_base = OTHER; note = S-phosphorothioate
  modified_base 29: mod_base = OTHER; note = 2-O-methylribose adenine
  modified_base 29..30: mod_base = OTHER; note R-N-(1,3-dimethylimidazolidin-2-ylidene)phosphoramidate
  modified_base 30: mod_base = um
  source 1..30: mol_type = other RNA

SEQ ID NO: 516 - RNA, 30 nt, synthetic construct; identical to SEQ ID NO: 273
  misc_feature 1..30: note = Synthetic: WV-47611
  misc_feature 1..30: note = Synthetic: ADR-0104254
  modified_base 1: mod_base = cm
  modified_base 1..2: mod_base = OTHER; note R-N-(1,3-dimethylimidazolidin-2-ylidene)phosphoramidate
  modified_base 2: mod_base = cm
  modified_base 2..3: mod_base = OTHER; note = S-phosphorothioate
  modified_base 3: mod_base = cm
  modified_base 3..4: mod_base = OTHER; note = S-phosphorothioate
  modified_base 4: mod_base = OTHER; note = 2-fluororibose adenine
  modified_base 4..5: mod_base = OTHER; note = S-phosphorothioate
  modified_base 5: mod_base = OTHER; note = 2-fluororibose guanine
  modified_base 5..6: mod_base = OTHER; note = S-phosphorothioate
  modified_base 6: mod_base = cm
  modified_base 7: mod_base = OTHER; note = 2-O-methylribose adenine
  modified_base 7..8: mod_base = OTHER; note = S-phosphorothioate
  modified_base 8: mod_base = OTHER; note = 2-fluororibose guanine
  modified_base 8..9: mod_base = OTHER; note = S-phosphorothioate
  modified_base 9: mod_base = OTHER; note = 2-fluororibose cytosine
  modified_base 10: mod_base = um
  modified_base 10..11: mod_base = OTHER; note = S-phosphorothioate
  modified_base 11: mod_base = um
  modified_base 11..12: mod_base = OTHER; note R-N-(1,3-dimethylimidazolidin-2-ylidene)phosphoramidate
  modified_base 12: mod_base = OTHER; note = 2-fluororibose cytosine
  modified_base 13: mod_base = OTHER; note = 2-fluororibose adenine
  modified_base 13..14: mod_base = OTHER; note = S-phosphorothioate
  modified_base 14: mod_base = gm
  modified_base 14..15: mod_base = OTHER; note R-N-(1,3-dimethylimidazolidin-2-ylidene)phosphoramidate
  modified_base 15: mod_base = OTHER; note = 2-fluororibose uracil
  modified_base 16: mod_base = cm
  modified_base 17: mod_base = cm
  modified_base 17..18: mod_base = OTHER; note = S-phosphorothioate
  modified_base 18: mod_base = OTHER; note = 2-fluororibose cytosine
  modified_base 18..19: mod_base = OTHER; note = S-phosphorothioate
  modified_base 19: mod_base = OTHER; note = 2-fluororibose uracil
  modified_base 19..20: mod_base = OTHER; note = S-phosphorothioate
  modified_base 20: mod_base = um
  modified_base 21: mod_base = um
  modified_base 22: mod_base = OTHER; note = 2-fluororibose cytosine
  modified_base 22..23: mod_base = OTHER; note = S-phosphorothioate
  modified_base 23: mod_base = OTHER; note = deoxyribose thymine
  modified_base 23..24: mod_base = OTHER; note = S-phosphorothioate
  modified_base 24: mod_base = OTHER; note = deoxyribose uracil (position 3 connectivity)
  modified_base 24..25: mod_base = OTHER; note = S-phosphorothioate
  modified_base 25: mod_base = OTHER; note = deoxyribose inosine
  modified_base 25..26: mod_base = OTHER; note S-N-(1,3-dimethylimidazolidin-2-ylidene)phosphoramidate
  modified_base 26: mod_base = um
  modified_base 27: mod_base = OTHER; note = 2-fluororibose cytosine
  modified_base 27..28: mod_base = OTHER; note = S-phosphorothioate
  modified_base 28: mod_base = gm
  modified_base 28..29: mod_base = OTHER; note = S-phosphorothioate
  modified_base 29: mod_base = OTHER; note = 2-O-methylribose adenine
  modified_base 29..30: mod_base = OTHER; note R-N-(1,3-dimethylimidazolidin-2-ylidene)phosphoramidate
  modified_base 30: mod_base = um
  source 1..30: mol_type = other RNA

SEQ ID NO: 517 - RNA, 30 nt, synthetic construct; identical to SEQ ID NO: 273
  misc_feature 1..30: note = Synthetic: WV-47612
  misc_feature 1..30: note = Synthetic: ADR-0104099
  modified_base 1: mod_base = cm
  modified_base 1..2: mod_base = OTHER; note R-N-(1,3-dimethylimidazolidin-2-ylidene)phosphoramidate
  modified_base 2: mod_base = cm
  modified_base 2..3: mod_base = OTHER; note = S-phosphorothioate
  modified_base 3: mod_base = cm
  modified_base 3..4: mod_base = OTHER; note = S-phosphorothioate
  modified_base 4: mod_base = OTHER; note = 2-fluororibose adenine
  modified_base 4..5: mod_base = OTHER; note = S-phosphorothioate
  modified_base 5: mod_base = OTHER; note = 2-fluororibose guanine
  modified_base 5..6: mod_base = OTHER; note = S-phosphorothioate
  modified_base 6: mod_base = OTHER; note = 2-O-methoxyethylribose 5-methyl-cytidine
  modified_base 7: mod_base = OTHER; note = 2-O-methylribose adenine
  modified_base 7..8: mod_base = OTHER; note = S-phosphorothioate
  modified_base 8: mod_base = OTHER; note = 2-fluororibose guanine
  modified_base 8..9: mod_base = OTHER; note = S-phosphorothioate
  modified_base 9: mod_base = OTHER; note = 2-fluororibose cytosine
  modified_base 10: mod_base = um
  modified_base 10..11: mod_base = OTHER; note = S-phosphorothioate
  modified_base 11: mod_base = OTHER; note = 2-fluororibose uracil
  modified_base 11..12: mod_base = OTHER; note R-N-(1,3-dimethylimidazolidin-2-ylidene)phosphoramidate
  modified_base 12: mod_base = cm
  modified_base 13: mod_base = OTHER; note = 2-fluororibose adenine
  modified_base 13..14: mod_base = OTHER; note = S-phosphorothioate
  modified_base 14: mod_base = OTHER; note = 2-fluororibose guanine
  modified_base 14..15: mod_base = OTHER; note R-N-(1,3-dimethylimidazolidin-2-ylidene)phosphoramidate
  modified_base 15: mod_base = OTHER; note = 2-fluororibose uracil
  modified_base 16: mod_base = OTHER; note = 2-O-methoxyethylribose 5-methyl-cytidine
  modified_base 17: mod_base = cm
  modified_base 17..18: mod_base = OTHER; note = S-phosphorothioate
  modified_base 18: mod_base = OTHER; note = 2-fluororibose cytosine
  modified_base 18..19: mod_base = OTHER; note = S-phosphorothioate
  modified_base 19: mod_base = OTHER; note = 2-fluororibose uracil
  modified_base 19..20: mod_base = OTHER; note = S-phosphorothioate
  modified_base 20: mod_base = um
  modified_base 21: mod_base = OTHER; note = 2-O-methoxyethylribose thymine
  modified_base 22: mod_base = OTHER; note = 2-fluororibose cytosine
  modified_base 22..23: mod_base = OTHER; note = S-phosphorothioate
  modified_base 23: mod_base = OTHER; note = deoxyribose thymine
  modified_base 23..24: mod_base = OTHER; note = S-phosphorothioate
  modified_base 24: mod_base = OTHER; note = deoxyribose uracil (position 3 connectivity)
  modified_base 24..25: mod_base = OTHER; note = S-phosphorothioate
  modified_base 25: mod_base = OTHER; note = deoxyribose inosine
  modified_base 25..26: mod_base = OTHER; note S-N-(1,3-dimethylimidazolidin-2-ylidene)phosphoramidate
  modified_base 26: mod_base = um
  modified_base 27: mod_base = OTHER; note = 2-fluororibose cytosine
  modified_base 27..28: mod_base = OTHER; note = S-phosphorothioate
  modified_base 28: mod_base = gm
  modified_base 28..29: mod_base = OTHER; note = S-phosphorothioate
  modified_base 29: mod_base = OTHER; note = 2-O-methylribose adenine
  modified_base 29..30: mod_base = OTHER; note R-N-(1,3-dimethylimidazolidin-2-ylidene)phosphoramidate
  modified_base 30: mod_base = um
  source 1..30: mol_type = other RNA

SEQ ID NO: 518 - RNA, 30 nt, synthetic construct; identical to SEQ ID NO: 273
  misc_feature 1..30: note = Synthetic: WV-47613
  misc_feature 1..30: note = Synthetic: ADR-0104098
  modified_base 1: mod_base = cm
  modified_base 1..2: mod_base = OTHER; note R-N-(1,3-dimethylimidazolidin-2-ylidene)phosphoramidate
  modified_base 2: mod_base = cm
  modified_base 2..3: mod_base = OTHER; note = S-phosphorothioate
  modified_base 3: mod_base = cm
  modified_base 3..4: mod_base = OTHER; note = S-phosphorothioate
  modified_base 4: mod_base = OTHER; note = 2-fluororibose adenine
  modified_base 4..5: mod_base = OTHER; note = S-phosphorothioate
  modified_base 5: mod_base = OTHER; note = 2-fluororibose guanine
  modified_base 5..6: mod_base = OTHER; note = S-phosphorothioate
  modified_base 6: mod_base = OTHER; note = 2-O-methoxyethylribose 5-methyl-cytidine
  modified_base 7: mod_base = OTHER; note = 2-O-methylribose adenine
  modified_base 7..8: mod_base = OTHER; note = S-phosphorothioate
  modified_base 8: mod_base = OTHER; note = 2-fluororibose guanine
  modified_base 8..9: mod_base = OTHER; note = S-phosphorothioate
  modified_base 9: mod_base = OTHER; note = 2-fluororibose cytosine
  modified_base 10: mod_base = um
  modified_base 10..11: mod_base = OTHER; note = S-phosphorothioate
  modified_base 11: mod_base = OTHER; note = 2-fluororibose uracil
  modified_base 11..12: mod_base = OTHER; note R-N-(1,3-dimethylimidazolidin-2-ylidene)phosphoramidate
  modified_base 12: mod_base = cm
  modified_base 13: mod_base = OTHER; note = 2-fluororibose adenine
  modified_base 13..14: mod_base = OTHER; note = S-phosphorothioate
  modified_base 14: mod_base = OTHER; note = 2-fluororibose guanine
  modified_base 14..15: mod_base = OTHER; note R-N-(1,3-dimethylimidazolidin-2-ylidene)phosphoramidate
  modified_base 15: mod_base = OTHER; note = 2-fluororibose uracil
  modified_base 16: mod_base = OTHER; note = 2-O-methoxyethylribose 5-methyl-cytidine
  modified_base 17: mod_base = cm
  modified_base 17..18: mod_base = OTHER; note = S-phosphorothioate
  modified_base 18: mod_base = OTHER; note = 2-fluororibose cytosine
  modified_base 18..19: mod_base = OTHER; note = S-phosphorothioate
  modified_base 19: mod_base = OTHER; note = 2-fluororibose uracil
  modified_base 19..20: mod_base = OTHER; note = S-phosphorothioate
  modified_base 20: mod_base = OTHER; note = 2-O-methoxyethylribose thymine
  modified_base 21: mod_base = OTHER; note = 2-O-methoxyethylribose thymine
  modified_base 22: mod_base = OTHER; note = 2-fluororibose cytosine
  modified_base 22..23: mod_base = OTHER; note = S-phosphorothioate
  modified_base 23: mod_base = OTHER; note = deoxyribose thymine
  modified_base 23..24: mod_base = OTHER; note = S-phosphorothioate
  modified_base 24: mod_base = OTHER; note = deoxyribose uracil (position 3 connectivity)
  modified_base 24..25: mod_base = OTHER; note = S-phosphorothioate
  modified_base 25: mod_base = OTHER; note = deoxyribose inosine
  modified_base 25..26: mod_base = OTHER; note S-N-(1,3-dimethylimidazolidin-2-ylidene)phosphoramidate
  modified_base 26: mod_base = um
  modified_base 27: mod_base = OTHER; note = 2-fluororibose cytosine
  modified_base 27..28: mod_base = OTHER; note = S-phosphorothioate
  modified_base 28: mod_base = gm
  modified_base 28..29: mod_base = OTHER; note = S-phosphorothioate
  modified_base 29: mod_base = OTHER; note = 2-O-methylribose adenine
  modified_base 29..30: mod_base = OTHER; note R-N-(1,3-dimethylimidazolidin-2-ylidene)phosphoramidate
  modified_base 30: mod_base = um
  source 1..30: mol_type = other RNA

SEQ ID NO: 519 - RNA, 30 nt, synthetic construct; identical to SEQ ID NO: 273
  misc_feature 1..30: note = Synthetic: WV-47614
  misc_feature 1..30: note = Synthetic: ADR-0103955
  modified_base 1: mod_base = OTHER; note = 2-O-methoxyethylribose 5-methyl-cytidine
  modified_base 1..2: mod_base = OTHER; note R-N-(1,3-dimethylimidazolidin-2-ylidene)phosphoramidate
  modified_base 2: mod_base = OTHER; note = 2-O-methoxyethylribose 5-methyl-cytidine
  modified_base 2..3: mod_base = OTHER; note = S-phosphorothioate
  modified_base 3: mod_base = OTHER; note = 2-O-methoxyethylribose 5-methyl-cytidine
  modified_base 3..4: mod_base = OTHER; note = S-phosphorothioate
  modified_base 4: mod_base = OTHER; note = 2-fluororibose adenine
  modified_base 4..5: mod_base = OTHER; note = S-phosphorothioate
  modified_base 5: mod_base = OTHER; note = 2-fluororibose guanine
  modified_base 5..6: mod_base = OTHER; note = S-phosphorothioate
  modified_base 6: mod_base = OTHER; note = 2-O-methoxyethylribose 5-methyl-cytidine
  modified_base 7: mod_base = OTHER; note = 2-O-methylribose adenine
  modified_base 7..8: mod_base = OTHER; note = S-phosphorothioate
  modified_base 8: mod_base = OTHER; note = 2-fluororibose guanine
  modified_base 8..9: mod_base = OTHER; note = S-phosphorothioate
  modified_base 9: mod_base = OTHER; note = 2-fluororibose cytosine
  modified_base 10: mod_base = um
  modified_base 10..11: mod_base = OTHER; note = S-phosphorothioate
  modified_base 11: mod_base = OTHER; note = 2-fluororibose uracil
  modified_base 11..12: mod_base = OTHER; note R-N-(1,3-dimethylimidazolidin-2-ylidene)phosphoramidate
  modified_base 12: mod_base = cm
  modified_base 13: mod_base = OTHER; note = 2-fluororibose adenine
  modified_base 13..14: mod_base = OTHER; note = S-phosphorothioate
  modified_base 14: mod_base = OTHER; note = 2-fluororibose guanine
  modified_base 14..15: mod_base = OTHER; note R-N-(1,3-dimethylimidazolidin-2-ylidene)phosphoramidate
  modified_base 15: mod_base = OTHER; note = 2-fluororibose uracil
  modified_base 16: mod_base = OTHER; note = 2-O-methoxyethylribose 5-methyl-cytidine
  modified_base 17: mod_base = cm
  modified_base 17..18: mod_base = OTHER; note = S-phosphorothioate
  modified_base 18: mod_base = OTHER; note = 2-fluororibose cytosine
  modified_base 18..19: mod_base = OTHER; note = S-phosphorothioate
  modified_base 19: mod_base = OTHER; note = 2-fluororibose uracil
  modified_base 19..20: mod_base = OTHER; note = S-phosphorothioate
  modified_base 20: mod_base = um
  modified_base 21: mod_base = OTHER; note = 2-O-methoxyethylribose thymine
  modified_base 22: mod_base = OTHER; note = 2-fluororibose cytosine
  modified_base 22..23: mod_base = OTHER; note = S-phosphorothioate
  modified_base 23: mod_base = OTHER; note = deoxyribose thymine
  modified_base 23..24: mod_base = OTHER; note = S-phosphorothioate
  modified_base 24: mod_base = OTHER; note = deoxyribose uracil (position 3 connectivity)
  modified_base 24..25: mod_base = OTHER; note = S-phosphorothioate
  modified_base 25: mod_base = OTHER; note = deoxyribose inosine
  modified_base 25..26: mod_base = OTHER; note S-N-(1,3-dimethylimidazolidin-2-ylidene)phosphoramidate
  modified_base 26: mod_base = um
  modified_base 27: mod_base = OTHER; note = 2-fluororibose cytosine
  modified_base 27..28: mod_base = OTHER; note = S-phosphorothioate
  modified_base 28: mod_base = gm
  modified_base 28..29: mod_base = OTHER; note = S-phosphorothioate
  modified_base 29: mod_base = OTHER; note = 2-O-methoxyethylribose adenine
  modified_base 29..30: mod_base = OTHER; note R-N-(1,3-dimethylimidazolidin-2-ylidene)phosphoramidate
  modified_base 30: mod_base = OTHER; note = 2-O-methoxyethylribose thymine
  source 1..30: mol_type = other RNA

SEQ ID NO: 520 - RNA, 30 nt, synthetic construct; identical to SEQ ID NO: 273
  misc_feature 1..30: note = Synthetic: WV-47615
  misc_feature 1..30: note = Synthetic: ADR-0103954
  modified_base 1: mod_base = OTHER; note = 2-O-methoxyethylribose 5-methyl-cytidine
  modified_base 1..2: mod_base = OTHER; note R-N-(1,3-dimethylimidazolidin-2-ylidene)phosphoramidate
  modified_base 2: mod_base = OTHER; note = 2-O-methoxyethylribose 5-methyl-cytidine
  modified_base 2..3: mod_base = OTHER; note = S-phosphorothioate
  modified_base 3: mod_base = OTHER; note = 2-O-methoxyethylribose 5-methyl-cytidine
  modified_base 3..4: mod_base = OTHER; note = S-phosphorothioate
  modified_base 4: mod_base = OTHER; note = 2-fluororibose adenine
  modified_base 4..5: mod_base = OTHER; note = S-phosphorothioate
  modified_base 5: mod_base = OTHER; note = 2-fluororibose guanine
  modified_base 5..6: mod_base = OTHER; note = S-phosphorothioate
  modified_base 6: mod_base = OTHER; note = 2-O-methoxyethylribose 5-methyl-cytidine
  modified_base 7: mod_base = OTHER; note = 2-O-methylribose adenine
  modified_base 7..8: mod_base = OTHER; note = S-phosphorothioate
  modified_base 8: mod_base = OTHER; note = 2-fluororibose guanine
  modified_base 8..9: mod_base = OTHER; note = S-phosphorothioate
  modified_base 9: mod_base = OTHER; note = 2-fluororibose cytosine
  modified_base 10: mod_base = um
  modified_base 10..11: mod_base = OTHER; note = S-phosphorothioate
  modified_base 11: mod_base = OTHER; note = 2-fluororibose uracil
  modified_base 11..12: mod_base = OTHER; note R-N-(1,3-dimethylimidazolidin-2-ylidene)phosphoramidate
  modified_base 12: mod_base = cm
  modified_base 13: mod_base = OTHER; note = 2-fluororibose adenine
  modified_base 13..14: mod_base = OTHER; note = S-phosphorothioate
  modified_base 14: mod_base = OTHER; note = 2-fluororibose guanine
  modified_base 14..15: mod_base = OTHER; note R-N-(1,3-dimethylimidazolidin-2-ylidene)phosphoramidate
  modified_base 15: mod_base = OTHER; note = 2-fluororibose uracil
  modified_base 16: mod_base = OTHER; note = 2-O-methoxyethylribose 5-methyl-cytidine
  modified_base 17: mod_base = cm
  modified_base 17..18: mod_base = OTHER; note = S-phosphorothioate
  modified_base 18: mod_base = OTHER; note = 2-fluororibose cytosine
  modified_base 18..19: mod_base = OTHER; note = S-phosphorothioate
  modified_base 19: mod_base = OTHER; note = 2-fluororibose uracil
  modified_base 19..20: mod_base = OTHER; note = S-phosphorothioate
  modified_base 20: mod_base = OTHER; note = 2-O-methoxyethylribose thymine
  modified_base 21: mod_base = OTHER; note = 2-O-methoxyethylribose thymine
  modified_base 22: mod_base = OTHER; note = 2-fluororibose cytosine
  modified_base 22..23: mod_base = OTHER; note = S-phosphorothioate
  modified_base 23: mod_base = OTHER; note = deoxyribose thymine
  modified_base 23..24: mod_base = OTHER; note = S-phosphorothioate
  modified_base 24: mod_base = OTHER; note = deoxyribose uracil (position 3 connectivity)
  modified_base 24..25: mod_base = OTHER; note = S-phosphorothioate
  modified_base 25: mod_base = OTHER; note = deoxyribose inosine
  modified_base 25..26: mod_base = OTHER; note S-N-(1,3-dimethylimidazolidin-2-ylidene)phosphoramidate
  modified_base 26: mod_base = um
  modified_base 27: mod_base = OTHER; note = 2-fluororibose cytosine
  modified_base 27..28: mod_base = OTHER; note = S-phosphorothioate
  modified_base 28: mod_base = gm
  modified_base 28..29: mod_base = OTHER; note = S-phosphorothioate
  modified_base 29: mod_base = OTHER; note = 2-O-methoxyethylribose adenine
  modified_base 29..30: mod_base = OTHER; note R-N-(1,3-dimethylimidazolidin-2-ylidene)phosphoramidate
  modified_base 30: mod_base = OTHER; note = 2-O-methoxyethylribose thymine
  source 1..30: mol_type = other RNA

SEQ ID NO: 521 - RNA, 30 nt, synthetic construct; identical to SEQ ID NO: 273
  misc_feature 1..30: note = Synthetic: WV-47616
  misc_feature 1..30: note = Synthetic: ADR-0104102
  modified_base 1: mod_base = cm
  modified_base 1..2: mod_base = OTHER; note R-N-(1,3-dimethylimidazolidin-2-ylidene)phosphoramidate
  modified_base 2: mod_base = cm
  modified_base 2..3: mod_base = OTHER; note = S-phosphorothioate
  modified_base 3: mod_base = cm
  modified_base 3..4: mod_base = OTHER; note = S-phosphorothioate
  modified_base 4: mod_base = OTHER; note = 2-fluororibose adenine
  modified_base 4..5: mod_base = OTHER; note = S-phosphorothioate
  modified_base 5: mod_base = OTHER; note = 2-fluororibose guanine
  modified_base 5..6: mod_base = OTHER; note = S-phosphorothioate
  modified_base 6: mod_base = OTHER; note = 2-O-methoxyethylribose 5-methyl-cytidine
  modified_base 7: mod_base = OTHER; note = 2-O-methylribose adenine
  modified_base 7..8: mod_base = OTHER; note = S-phosphorothioate
  modified_base 8: mod_base = OTHER; note = 2-fluororibose guanine
  modified_base 8..9: mod_base = OTHER; note = S-phosphorothioate
  modified_base 9: mod_base = OTHER; note = 2-fluororibose cytosine
  modified_base 10: mod_base = um
  modified_base 10..11: mod_base = OTHER; note = S-phosphorothioate
  modified_base 11: mod_base = OTHER; note = 2-fluororibose uracil
  modified_base 11..12: mod_base = OTHER; note R-N-(1,3-dimethylimidazolidin-2-ylidene)phosphoramidate
  modified_base 12: mod_base = cm
  modified_base 13: mod_base = OTHER; note = 2-fluororibose adenine
  modified_base 13..14: mod_base = OTHER; note = S-phosphorothioate
  modified_base 14: mod_base = gm
  modified_base 14..15: mod_base = OTHER; note R-N-(1,3-dimethylimidazolidin-2-ylidene)phosphoramidate
  modified_base 15: mod_base = OTHER; note = 2-fluororibose uracil
  modified_base 16: mod_base = OTHER; note = 2-O-methoxyethylribose 5-methyl-cytidine
  modified_base 17: mod_base = cm
  modified_base 17..18: mod_base = OTHER; note = S-phosphorothioate
  modified_base 18: mod_base = OTHER; note = 2-fluororibose cytosine
  modified_base 18..19: mod_base = OTHER; note = S-phosphorothioate
  modified_base 19: mod_base = OTHER; note = 2-fluororibose uracil
  modified_base 19..20: mod_base = OTHER; note = S-phosphorothioate
  modified_base 20: mod_base = um
  modified_base 21: mod_base = OTHER; note = 2-O-methoxyethylribose thymine
  modified_base 22: mod_base = OTHER; note = 2-fluororibose cytosine
  modified_base 22..23: mod_base = OTHER; note = S-phosphorothioate
  modified_base 23: mod_base = OTHER; note = deoxyribose thymine
  modified_base 23..24: mod_base = OTHER; note = S-phosphorothioate
  modified_base 24: mod_base = OTHER; note = deoxyribose uracil (position 3 connectivity)
  modified_base 24..25: mod_base = OTHER; note = S-phosphorothioate
  modified_base 25: mod_base = OTHER; note = deoxyribose inosine
  modified_base 25..26: mod_base = OTHER; note S-N-(1,3-dimethylimidazolidin-2-ylidene)phosphoramidate
  modified_base 26: mod_base = um
  modified_base 27: mod_base = OTHER; note = 2-fluororibose cytosine
  modified_base 27..28: mod_base = OTHER; note = S-phosphorothioate
  modified_base 28: mod_base = gm
  modified_base 28..29: mod_base = OTHER; note = S-phosphorothioate
  modified_base 29: mod_base = OTHER; note = 2-O-methylribose adenine
  modified_base 29..30: mod_base = OTHER; note R-N-(1,3-dimethylimidazolidin-2-ylidene)phosphoramidate
  modified_base 30: mod_base = um
  source 1..30: mol_type = other RNA

SEQ ID NO: 522 - RNA, 30 nt, synthetic construct; identical to SEQ ID NO: 273
  misc_feature 1..30: note = Synthetic: WV-47617
  misc_feature 1..30: note = Synthetic: ADR-0104101
  modified_base 1: mod_base = cm
  modified_base 1..2: mod_base = OTHER; note R-N-(1,3-dimethylimidazolidin-2-ylidene)phosphoramidate
  modified_base 2: mod_base = cm
  modified_base 2..3: mod_base = OTHER; note = S-phosphorothioate
  modified_base 3: mod_base = cm
  modified_base 3..4: mod_base = OTHER; note = S-phosphorothioate
  modified_base 4: mod_base = OTHER; note = 2-fluororibose adenine
  modified_base 4..5: mod_base = OTHER; note = S-phosphorothioate
  modified_base 5: mod_base = OTHER; note = 2-fluororibose guanine
  modified_base 5..6: mod_base = OTHER; note = S-phosphorothioate
  modified_base 6: mod_base = OTHER; note = 2-O-methoxyethylribose 5-methyl-cytidine
  modified_base 7: mod_base = OTHER; note = 2-O-methylribose adenine
  modified_base 7..8: mod_base = OTHER; note = S-phosphorothioate
  modified_base 8: mod_base = OTHER; note = 2-fluororibose guanine
  modified_base 8..9: mod_base = OTHER; note = S-phosphorothioate
  modified_base 9: mod_base = OTHER; note = 2-fluororibose cytosine
  modified_base 10: mod_base = um
  modified_base 10..11: mod_base = OTHER; note = S-phosphorothioate
  modified_base 11: mod_base = OTHER; note = 2-fluororibose uracil
  modified_base 11..12: mod_base = OTHER; note R-N-(1,3-dimethylimidazolidin-2-ylidene)phosphoramidate
  modified_base 12: mod_base = cm
  modified_base 13: mod_base = OTHER; note = 2-fluororibose adenine
  modified_base 13..14: mod_base = OTHER; note = S-phosphorothioate
  modified_base 14: mod_base = gm
  modified_base 14..15: mod_base = OTHER; note R-N-(1,3-dimethylimidazolidin-2-ylidene)phosphoramidate
  modified_base 15: mod_base = OTHER; note = 2-fluororibose uracil
  modified_base 16: mod_base = OTHER; note = 2-O-methoxyethylribose 5-methyl-cytidine
  modified_base 17: mod_base = cm
  modified_base 17..18: mod_base = OTHER; note = S-phosphorothioate
  modified_base 18: mod_base = OTHER; note = 2-fluororibose cytosine
  modified_base 18..19: mod_base = OTHER; note = S-phosphorothioate
  modified_base 19: mod_base = OTHER; note = 2-fluororibose uracil
  modified_base 19..20: mod_base = OTHER; note = S-phosphorothioate
  modified_base 20: mod_base = OTHER; note = 2-O-methoxyethylribose thymine
  modified_base 21: mod_base = OTHER; note = 2-O-methoxyethylribose thymine
  modified_base 22: mod_base = OTHER; note = 2-fluororibose cytosine
  modified_base 22..23: mod_base = OTHER; note = S-phosphorothioate
  modified_base 23: mod_base = OTHER; note = deoxyribose thymine
  modified_base 23..24: mod_base = OTHER; note = S-phosphorothioate
  modified_base 24: mod_base = OTHER; note = deoxyribose uracil (position 3 connectivity)
  modified_base 24..25: mod_base = OTHER; note = S-phosphorothioate
  modified_base 25: mod_base = OTHER; note = deoxyribose inosine
  modified_base 25..26: mod_base = OTHER; note S-N-(1,3-dimethylimidazolidin-2-ylidene)phosphoramidate
  modified_base 26: mod_base = um
  modified_base 27: mod_base = OTHER; note = 2-fluororibose cytosine
  modified_base 27..28: mod_base = OTHER; note = S-phosphorothioate
  modified_base 28: mod_base = gm
  modified_base 28..29: mod_base = OTHER; note = S-phosphorothioate
  modified_base 29: mod_base = OTHER; note = 2-O-methylribose adenine
  modified_base 29..30: mod_base = OTHER; note R-N-(1,3-dimethylimidazolidin-2-ylidene)phosphoramidate
  modified_base 30: mod_base = um
  source 1..30: mol_type = other RNA

SEQ ID NO: 523 - RNA, 30 nt, synthetic construct; identical to SEQ ID NO: 273
  misc_feature 1..30: note = Synthetic: WV-47618
  misc_feature 1..30: note = Synthetic: ADR-0103957
  modified_base 1: mod_base = OTHER; note = 2-O-methoxyethylribose 5-methyl-cytidine
  modified_base 1..2: mod_base = OTHER; note R-N-(1,3-dimethylimidazolidin-2-ylidene)phosphoramidate
  modified_base 2: mod_base = OTHER; note = 2-O-methoxyethylribose 5-methyl-cytidine
  modified_base 2..3: mod_base = OTHER; note = S-phosphorothioate
  modified_base 3: mod_base = OTHER; note = 2-O-methoxyethylribose 5-methyl-cytidine
  modified_base 3..4: mod_base = OTHER; note = S-phosphorothioate
  modified_base 4: mod_base = OTHER; note = 2-fluororibose adenine
  modified_base 4..5: mod_base = OTHER; note = S-phosphorothioate
  modified_base 5: mod_base = OTHER; note = 2-fluororibose guanine
  modified_base 5..6: mod_base = OTHER; note = S-phosphorothioate
  modified_base 6: mod_base = OTHER; note = 2-O-methoxyethylribose 5-methyl-cytidine
  modified_base 7: mod_base = OTHER; note = 2-O-methylribose adenine
  modified_base 7..8: mod_base = OTHER; note = S-phosphorothioate
  modified_base 8: mod_base = OTHER; note = 2-fluororibose guanine
  modified_base 8..9: mod_base = OTHER; note = S-phosphorothioate
  modified_base 9: mod_base = OTHER; note = 2-fluororibose cytosine
  modified_base 10: mod_base = um
  modified_base 10..11: mod_base = OTHER; note = S-phosphorothioate
  modified_base 11: mod_base = OTHER; note = 2-fluororibose uracil
  modified_base 11..12: mod_base = OTHER; note R-N-(1,3-dimethylimidazolidin-2-ylidene)phosphoramidate
  modified_base 12: mod_base = cm
  modified_base 13: mod_base = OTHER; note = 2-fluororibose adenine
  modified_base 13..14: mod_base = OTHER; note = S-phosphorothioate
  modified_base 14: mod_base = gm
  modified_base 14..15: mod_base = OTHER; note R-N-(1,3-dimethylimidazolidin-2-ylidene)phosphoramidate
  modified_base 15: mod_base = OTHER; note = 2-fluororibose uracil
  modified_base 16: mod_base = OTHER; note = 2-O-methoxyethylribose 5-methyl-cytidine
  modified_base 17: mod_base = cm
  modified_base 17..18: mod_base = OTHER; note = S-phosphorothioate
  modified_base 18: mod_base = OTHER; note = 2-fluororibose cytosine
  modified_base 18..19: mod_base = OTHER; note = S-phosphorothioate
  modified_base 19: mod_base = OTHER; note = 2-fluororibose uracil
  modified_base 19..20: mod_base = OTHER; note = S-phosphorothioate
  modified_base 20: mod_base = um
  modified_base 21: mod_base = OTHER; note = 2-O-methoxyethylribose thymine
  modified_base 22: mod_base = OTHER; note = 2-fluororibose cytosine
  modified_base 22..23: mod_base = OTHER; note = S-phosphorothioate
  modified_base 23: mod_base = OTHER; note = deoxyribose thymine
  modified_base 23..24: mod_base = OTHER; note = S-phosphorothioate
  modified_base 24: mod_base = OTHER; note = deoxyribose uracil (position 3 connectivity)
  modified_base 24..25: mod_base = OTHER; note = S-phosphorothioate
  modified_base 25: mod_base = OTHER; note = deoxyribose inosine
  modified_base 25..26: mod_base = OTHER; note S-N-(1,3-dimethylimidazolidin-2-ylidene)phosphoramidate
  modified_base 26: mod_base = um
  modified_base 27: mod_base = OTHER; note = 2-fluororibose cytosine
  modified_base 27..28: mod_base = OTHER; note = S-phosphorothioate
  modified_base 28: mod_base = gm
  modified_base 28..29: mod_base = OTHER; note = S-phosphorothioate
  modified_base 29: mod_base = OTHER; note = 2-O-methoxyethylribose adenine
  modified_base 29..30: mod_base = OTHER; note R-N-(1,3-dimethylimidazolidin-2-ylidene)phosphoramidate
  modified_base 30: mod_base = OTHER; note = 2-O-methoxyethylribose thymine
  source 1..30: mol_type = other RNA

SEQ ID NO: 524 - RNA, 30 nt, synthetic construct; identical to SEQ ID NO: 273
  misc_feature 1..30: note = Synthetic: WV-47619
  misc_feature 1..30: note = Synthetic: ADR-0103956
  modified_base 1: mod_base = OTHER; note = 2-O-methoxyethylribose 5-methyl-cytidine
  modified_base 1..2: mod_base = OTHER; note R-N-(1,3-dimethylimidazolidin-2-ylidene)phosphoramidate
  modified_base 2: mod_base = OTHER; note = 2-O-methoxyethylribose 5-methyl-cytidine
  modified_base 2..3: mod_base = OTHER; note = S-phosphorothioate
  modified_base 3: mod_base = OTHER; note = 2-O-methoxyethylribose 5-methyl-cytidine
  modified_base 3..4: mod_base = OTHER; note = S-phosphorothioate
  modified_base 4: mod_base = OTHER; note = 2-fluororibose adenine
  modified_base 4..5: mod_base = OTHER; note = S-phosphorothioate
  modified_base 5: mod_base = OTHER; note = 2-fluororibose guanine
  modified_base 5..6: mod_base = OTHER; note = S-phosphorothioate
  modified_base 6: mod_base = OTHER; note = 2-O-methoxyethylribose 5-methyl-cytidine
  modified_base 7: mod_base = OTHER; note = 2-O-methylribose adenine
  modified_base 7..8: mod_base = OTHER; note = S-phosphorothioate
  modified_base 8: mod_base = OTHER; note = 2-fluororibose guanine
  modified_base 8..9: mod_base = OTHER; note = S-phosphorothioate
  modified_base 9: mod_base = OTHER; note = 2-fluororibose cytosine
  modified_base 10: mod_base = um
  modified_base 10..11: mod_base = OTHER; note = S-phosphorothioate
  modified_base 11: mod_base = OTHER; note = 2-fluororibose uracil
  modified_base 11..12: mod_base = OTHER; note R-N-(1,3-dimethylimidazolidin-2-ylidene)phosphoramidate
  modified_base 12: mod_base = cm
  modified_base 13: mod_base = OTHER; note = 2-fluororibose adenine
  modified_base 13..14: mod_base = OTHER; note = S-phosphorothioate
  modified_base 14: mod_base = gm
  modified_base 14..15: mod_base = OTHER; note R-N-(1,3-dimethylimidazolidin-2-ylidene)phosphoramidate
  modified_base 15: mod_base = OTHER; note = 2-fluororibose uracil
  modified_base 16: mod_base = OTHER; note = 2-O-methoxyethylribose 5-methyl-cytidine
  modified_base 17: mod_base = cm
  modified_base 17..18: mod_base = OTHER; note = S-phosphorothioate
  modified_base 18: mod_base = OTHER; note = 2-fluororibose cytosine
  modified_base 18..19: mod_base = OTHER; note = S-phosphorothioate
  modified_base 19: mod_base = OTHER; note = 2-fluororibose uracil
  modified_base 19..20: mod_base = OTHER; note = S-phosphorothioate
  modified_base 20: mod_base = OTHER; note = 2-O-methoxyethylribose thymine
  modified_base 21: mod_base = OTHER; note = 2-O-methoxyethylribose thymine
  modified_base 22: mod_base = OTHER; note = 2-fluororibose cytosine
  modified_base 22..23: mod_base = OTHER; note = S-phosphorothioate
  modified_base 23: mod_base = OTHER; note = deoxyribose thymine
  modified_base 23..24: mod_base = OTHER; note = S-phosphorothioate
  modified_base 24: mod_base = OTHER; note = deoxyribose uracil (position 3 connectivity)
  modified_base 24..25: mod_base = OTHER; note = S-phosphorothioate
  modified_base 25: mod_base = OTHER; note = deoxyribose inosine
  modified_base 25..26: mod_base = OTHER; note S-N-(1,3-dimethylimidazolidin-2-ylidene)phosphoramidate
  modified_base 26: mod_base = um
  modified_base 27: mod_base = OTHER; note = 2-fluororibose cytosine
  modified_base 27..28: mod_base = OTHER; note = S-phosphorothioate
  modified_base 28: mod_base = gm
  modified_base 28..29: mod_base = OTHER; note = S-phosphorothioate
  modified_base 29: mod_base = OTHER; note = 2-O-methoxyethylribose adenine
  modified_base 29..30: mod_base = OTHER; note R-N-(1,3-dimethylimidazolidin-2-ylidene)phosphoramidate
  modified_base 30: mod_base = OTHER; note = 2-O-methoxyethylribose thymine
  source 1..30: mol_type = other RNA

SEQ ID NO: 525 - RNA, 30 nt, synthetic construct; identical to SEQ ID NO: 273
  misc_feature 1..30: note = Synthetic: WV-46452
  misc_feature 1..30: note = Synthetic: ADR-0104093
  modified_base 1: mod_base = cm
  modified_base 1..2: mod_base = OTHER; note R-N-(1,3-dimethylimidazolidin-2-ylidene)phosphoramidate
  modified_base 2: mod_base = cm
  modified_base 2..3: mod_base = OTHER; note = S-phosphorothioate
  modified_base 3: mod_base = cm
  modified_base 3..4: mod_base = OTHER; note = S-phosphorothioate
  modified_base 4: mod_base = OTHER; note = 2-fluororibose adenine
  modified_base 4..5: mod_base = OTHER; note = S-phosphorothioate
  modified_base 5: mod_base = OTHER; note = 2-fluororibose guanine
  modified_base 5..6: mod_base = OTHER; note = S-phosphorothioate
  modified_base 6: mod_base = OTHER; note = 2-O-methoxyethylribose 5-methyl-cytidine
  modified_base 7: mod_base = OTHER; note = 2-O-methylribose adenine
  modified_base 7..8: mod_base = OTHER; note = S-phosphorothioate
  modified_base 8: mod_base = OTHER; note = 2-fluororibose guanine
  modified_base 8..9: mod_base = OTHER; note = S-phosphorothioate
  modified_base 9: mod_base = OTHER; note = 2-fluororibose cytosine
  modified_base 10: mod_base = OTHER; note = 2-O-methoxyethylribose thymine
  modified_base 10..11: mod_base = OTHER; note = S-phosphorothioate
  modified_base 11: mod_base = OTHER; note = 2-fluororibose uracil
  modified_base 11..12: mod_base = OTHER; note R-N-(1,3-dimethylimidazolidin-2-ylidene)phosphoramidate
  modified_base 12: mod_base = cm
  modified_base 13: mod_base = OTHER; note = 2-fluororibose adenine
  modified_base 13..14: mod_base = OTHER; note = S-phosphorothioate
  modified_base 14: mod_base = OTHER; note = 2-fluororibose guanine
  modified_base 14..15: mod_base = OTHER; note R-N-(1,3-dimethylimidazolidin-2-ylidene)phosphoramidate
  modified_base 15: mod_base = OTHER; note = 2-fluororibose uracil
  modified_base 16: mod_base = cm
  modified_base 16..17: mod_base = OTHER; note = S-phosphorothioate
  modified_base 17: mod_base = OTHER; note = 2-fluororibose cytosine
  modified_base 17..18: mod_base = OTHER; note = S-phosphorothioate
  modified_base 18: mod_base = OTHER; note = 2-fluororibose cytosine
  modified_base 18..19: mod_base = OTHER; note = S-phosphorothioate
  modified_base 19: mod_base = OTHER; note = 2-fluororibose uracil
  modified_base 19..20: mod_base = OTHER; note = S-phosphorothioate
  modified_base 20: mod_base = um
  modified_base 21: mod_base = OTHER; note = 2-O-methoxyethylribose thymine
  modified_base 22: mod_base = OTHER; note = 2-fluororibose cytosine
  modified_base 22..23: mod_base = OTHER; note = S-phosphorothioate
  modified_base 23: mod_base = OTHER; note = deoxyribose thymine
  modified_base 23..24: mod_base = OTHER; note = S-phosphorothioate
  modified_base 24: mod_base = OTHER; note = deoxyribose uracil (position 3 connectivity)
  modified_base 24..25: mod_base = OTHER; note = S-phosphorothioate
  modified_base 25: mod_base = OTHER; note = deoxyribose inosine
  modified_base 25..26: mod_base = OTHER; note S-N-(1,3-dimethylimidazolidin-2-ylidene)phosphoramidate
  modified_base 26: mod_base = um
  modified_base 27: mod_base = OTHER; note = 2-fluororibose cytosine
  modified_base 27..28: mod_base = OTHER; note = S-phosphorothioate
  modified_base 28: mod_base = gm
  modified_base 28..29: mod_base = OTHER; note = S-phosphorothioate
  modified_base 29: mod_base = OTHER; note = 2-O-methylribose adenine
  modified_base 29..30: mod_base = OTHER; note R-N-(1,3-dimethylimidazolidin-2-ylidene)phosphoramidate
  modified_base 30: mod_base = um
  source 1..30: mol_type = other RNA

SEQ ID NO: 526 - RNA, 30 nt, synthetic construct; identical to SEQ ID NO: 273
  misc_feature 1..30: note = Synthetic: WV-47620
  misc_feature 1..30: note = Synthetic: ADR-0103949
  modified_base 1: mod_base = OTHER; note = 2-O-methoxyethylribose 5-methyl-cytidine
  modified_base 1..2: mod_base = OTHER; note R-N-(1,3-dimethylimidazolidin-2-ylidene)phosphoramidate
  modified_base 2: mod_base = OTHER; note = 2-O-methoxyethylribose 5-methyl-cytidine
  modified_base 2..3: mod_base = OTHER; note = S-phosphorothioate
  modified_base 3: mod_base = OTHER; note = 2-O-methoxyethylribose 5-methyl-cytidine
  modified_base 3..4: mod_base = OTHER; note = S-phosphorothioate
  modified_base 4: mod_base = OTHER; note = 2-fluororibose adenine
  modified_base 4..5: mod_base = OTHER; note = S-phosphorothioate
  modified_base 5: mod_base = OTHER; note = 2-fluororibose guanine
  modified_base 5..6: mod_base = OTHER; note = S-phosphorothioate
  modified_base 6: mod_base = OTHER; note = 2-O-methoxyethylribose 5-methyl-cytidine
  modified_base 7: mod_base = OTHER; note = 2-O-methylribose adenine
  modified_base 7..8: mod_base = OTHER; note = S-phosphorothioate
  modified_base 8: mod_base = OTHER; note = 2-fluororibose guanine
  modified_base 8..9: mod_base = OTHER; note = S-phosphorothioate
  modified_base 9: mod_base = OTHER; note = 2-fluororibose cytosine
  modified_base 10: mod_base = OTHER; note = 2-O-methoxyethylribose thymine
  modified_base 10..11: mod_base = OTHER; note = S-phosphorothioate
  modified_base 11: mod_base = OTHER; note = 2-fluororibose uracil
  modified_base 11..12: mod_base = OTHER; note R-N-(1,3-dimethylimidazolidin-2-ylidene)phosphoramidate
  modified_base 12: mod_base = cm
  modified_base 13: mod_base = OTHER; note = 2-fluororibose adenine
  modified_base 13..14: mod_base = OTHER; note = S-phosphorothioate
  modified_base 14: mod_base = OTHER; note = 2-fluororibose guanine
  modified_base 14..15: mod_base = OTHER; note R-N-(1,3-dimethylimidazolidin-2-ylidene)phosphoramidate
  modified_base 15: mod_base = OTHER; note = 2-fluororibose uracil
  modified_base 16: mod_base = cm
  modified_base 16..17: mod_base = OTHER; note = S-phosphorothioate
  modified_base 17: mod_base = OTHER; note = 2-fluororibose cytosine
  modified_base 17..18: mod_base = OTHER; note = S-phosphorothioate
  modified_base 18: mod_base = OTHER; note = 2-fluororibose cytosine
  modified_base 18..19: mod_base = OTHER; note = S-phosphorothioate
  modified_base 19: mod_base = OTHER; note = 2-fluororibose uracil
  modified_base 19..20: mod_base = OTHER; note = S-phosphorothioate
  modified_base 20: mod_base = um
  modified_base 21: mod_base = OTHER; note = 2-O-methoxyethylribose thymine
  modified_base 22: mod_base = OTHER; note = 2-fluororibose cytosine
  modified_base 22..23: mod_base = OTHER; note = S-phosphorothioate
  modified_base 23: mod_base = OTHER; note = deoxyribose thymine
  modified_base 23..24: mod_base = OTHER; note = S-phosphorothioate
  modified_base 24: mod_base = OTHER; note = deoxyribose uracil (position 3 connectivity)
  modified_base 24..25: mod_base = OTHER; note = S-phosphorothioate
  modified_base 25: mod_base = OTHER; note = deoxyribose inosine
  modified_base 25..26: mod_base = OTHER; note S-N-(1,3-dimethylimidazolidin-2-ylidene)phosphoramidate
  modified_base 26: mod_base = um
  modified_base 27: mod_base = OTHER; note = 2-fluororibose cytosine
  modified_base 27..28: mod_base = OTHER; note = S-phosphorothioate
  modified_base 28: mod_base = gm
  modified_base 28..29: mod_base = OTHER; note = S-phosphorothioate
  modified_base 29: mod_base = OTHER; note = 2-O-methoxyethylribose adenine
  modified_base 29..30: mod_base = OTHER; note R-N-(1,3-dimethylimidazolidin-2-ylidene)phosphoramidate
  modified_base 30: mod_base = OTHER; note = 2-O-methoxyethylribose thymine
  source 1..30: mol_type = other RNA

SEQ ID NO: 527 - RNA, 30 nt, synthetic construct; identical to SEQ ID NO: 273
  misc_feature 1..30: note = Synthetic: WV-47621
  misc_feature 1..30: note = Synthetic: ADR-0104096
  modified_base 1: mod_base = cm
  modified_base 1..2: mod_base = OTHER; note R-N-(1,3-dimethylimidazolidin-2-ylidene)phosphoramidate
  modified_base 2: mod_base = cm
  modified_base 2..3: mod_base = OTHER; note = S-phosphorothioate
  modified_base 3: mod_base = cm
  modified_base 3..4: mod_base = OTHER; note = S-phosphorothioate
  modified_base 4: mod_base = OTHER; note = 2-fluororibose adenine
  modified_base 4..5: mod_base = OTHER; note = S-phosphorothioate
  modified_base 5: mod_base = OTHER; note = 2-fluororibose guanine
  modified_base 5..6: mod_base = OTHER; note = S-phosphorothioate
  modified_base 6: mod_base = OTHER; note = 2-O-methoxyethylribose 5-methyl-cytidine
  modified_base 7: mod_base = OTHER; note = 2-O-methylribose adenine
  modified_base 7..8: mod_base = OTHER; note = S-phosphorothioate
  modified_base 8: mod_base = OTHER; note = 2-fluororibose guanine
  modified_base 8..9: mod_base = OTHER; note = S-phosphorothioate
  modified_base 9: mod_base = OTHER; note = 2-fluororibose cytosine
  modified_base 10: mod_base = OTHER; note = 2-O-methoxyethylribose thymine
  modified_base 10..11: mod_base = OTHER; note = S-phosphorothioate
  modified_base 11: mod_base = OTHER; note = 2-fluororibose uracil
  modified_base 11..12: mod_base = OTHER; note R-N-(1,3-dimethylimidazolidin-2-ylidene)phosphoramidate
  modified_base 12: mod_base = cm
  modified_base 13: mod_base = OTHER; note = 2-fluororibose adenine
  modified_base 13..14: mod_base = OTHER; note = S-phosphorothioate
  modified_base 14: mod_base = gm
  modified_base 14..15: mod_base = OTHER; note R-N-(1,3-dimethylimidazolidin-2-ylidene)phosphoramidate
  modified_base 15: mod_base = OTHER; note = 2-fluororibose uracil
  modified_base 16: mod_base = cm
  modified_base 16..17: mod_base = OTHER; note = S-phosphorothioate
  modified_base 17: mod_base = OTHER; note = 2-fluororibose cytosine
  modified_base 17..18: mod_base = OTHER; note = S-phosphorothioate
  modified_base 18: mod_base = OTHER; note = 2-fluororibose cytosine
  modified_base 18..19: mod_base = OTHER; note = S-phosphorothioate
  modified_base 19: mod_base = OTHER; note = 2-fluororibose uracil
  modified_base 19..20: mod_base = OTHER; note = S-phosphorothioate
  modified_base 20: mod_base = um
  modified_base 21: mod_base = OTHER; note = 2-O-methoxyethylribose thymine
  modified_base 22: mod_base = OTHER; note = 2-fluororibose cytosine
  modified_base 22..23: mod_base = OTHER; note = S-phosphorothioate
  modified_base 23: mod_base = OTHER; note = deoxyribose thymine
  modified_base 23..24: mod_base = OTHER; note = S-phosphorothioate
  modified_base 24: mod_base = OTHER; note = deoxyribose uracil (position 3 connectivity)
  modified_base 24..25: mod_base = OTHER; note = S-phosphorothioate
  modified_base 25: mod_base = OTHER; note = deoxyribose inosine
  modified_base 25..26: mod_base = OTHER; note S-N-(1,3-dimethylimidazolidin-2-ylidene)phosphoramidate
  modified_base 26: mod_base = um
  modified_base 27: mod_base = OTHER; note = 2-fluororibose cytosine
  modified_base 27..28: mod_base = OTHER; note = S-phosphorothioate
  modified_base 28: mod_base = gm
  modified_base 28..29: mod_base = OTHER; note = S-phosphorothioate
  modified_base 29: mod_base = OTHER; note = 2-O-methylribose adenine
  modified_base 29..30: mod_base = OTHER; note R-N-(1,3-dimethylimidazolidin-2-ylidene)phosphoramidate
  modified_base 30: mod_base = um
  source 1..30: mol_type = other RNA

SEQ ID NO: 528 - RNA, 30 nt, synthetic construct; identical to SEQ ID NO: 273
  misc_feature 1..30: note = Synthetic: WV-47622
  misc_feature 1..30: note = Synthetic: ADR-0103952
  modified_base 1: mod_base = OTHER; note = 2-O-methoxyethylribose 5-methyl-cytidine
  modified_base 1..2: mod_base = OTHER; note R-N-(1,3-dimethylimidazolidin-2-ylidene)phosphoramidate
  modified_base 2: mod_base = OTHER; note = 2-O-methoxyethylribose 5-methyl-cytidine
  modified_base 2..3: mod_base = OTHER; note = S-phosphorothioate
  modified_base 3: mod_base = OTHER; note = 2-O-methoxyethylribose 5-methyl-cytidine
  modified_base 3..4: mod_base = OTHER; note = S-phosphorothioate
  modified_base 4: mod_base = OTHER; note = 2-fluororibose adenine
  modified_base 4..5: mod_base = OTHER; note = S-phosphorothioate
  modified_base 5: mod_base = OTHER; note = 2-fluororibose guanine
  modified_base 5..6: mod_base = OTHER; note = S-phosphorothioate
  modified_base 6: mod_base = OTHER; note = 2-O-methoxyethylribose 5-methyl-cytidine
  modified_base 7: mod_base = OTHER; note = 2-O-methylribose adenine
  modified_base 7..8: mod_base = OTHER; note = S-phosphorothioate
  modified_base 8: mod_base = OTHER; note = 2-fluororibose guanine
  modified_base 8..9: mod_base = OTHER; note = S-phosphorothioate
  modified_base 9: mod_base = OTHER; note = 2-fluororibose cytosine
  modified_base 10: mod_base = OTHER; note = 2-O-methoxyethylribose thymine
  modified_base 10..11: mod_base = OTHER; note = S-phosphorothioate
  modified_base 11: mod_base = OTHER; note = 2-fluororibose uracil
  modified_base 11..12: mod_base = OTHER; note R-N-(1,3-dimethylimidazolidin-2-ylidene)phosphoramidate
  modified_base 12: mod_base = cm
  modified_base 13: mod_base = OTHER; note = 2-fluororibose adenine
  modified_base 13..14: mod_base = OTHER; note = S-phosphorothioate
  modified_base 14: mod_base = gm
  modified_base 14..15: mod_base = OTHER; note R-N-(1,3-dimethylimidazolidin-2-ylidene)phosphoramidate
  modified_base 15: mod_base = OTHER; note = 2-fluororibose uracil
  modified_base 16: mod_base = cm
  modified_base 16..17: mod_base = OTHER; note = S-phosphorothioate
  modified_base 17: mod_base = OTHER; note = 2-fluororibose cytosine
  modified_base 17..18: mod_base = OTHER; note = S-phosphorothioate
  modified_base 18: mod_base = OTHER; note = 2-fluororibose cytosine
  modified_base 18..19: mod_base = OTHER; note = S-phosphorothioate
  modified_base 19: mod_base = OTHER; note = 2-fluororibose uracil
  modified_base 19..20: mod_base = OTHER; note = S-phosphorothioate
  modified_base 20: mod_base = um
  modified_base 21: mod_base = OTHER; note = 2-O-methoxyethylribose thymine
  modified_base 22: mod_base = OTHER; note = 2-fluororibose cytosine
  modified_base 22..23: mod_base = OTHER; note = S-phosphorothioate
  modified_base 23: mod_base = OTHER; note = deoxyribose thymine
  modified_base 23..24: mod_base = OTHER; note = S-phosphorothioate
  modified_base 24: mod_base = OTHER; note = deoxyribose uracil (position 3 connectivity)
  modified_base 24..25: mod_base = OTHER; note = S-phosphorothioate
  modified_base 25: mod_base = OTHER; note = deoxyribose inosine
  modified_base 25..26: mod_base = OTHER; note S-N-(1,3-dimethylimidazolidin-2-ylidene)phosphoramidate
  modified_base 26: mod_base = um
  modified_base 27: mod_base = OTHER; note = 2-fluororibose cytosine
  modified_base 27..28: mod_base = OTHER; note = S-phosphorothioate
  modified_base 28: mod_base = gm
  modified_base 28..29: mod_base = OTHER; note = S-phosphorothioate
  modified_base 29: mod_base = OTHER; note = 2-O-methoxyethylribose adenine
  modified_base 29..30: mod_base = OTHER; note R-N-(1,3-dimethylimidazolidin-2-ylidene)phosphoramidate
  modified_base 30: mod_base = OTHER; note = 2-O-methoxyethylribose thymine
  source 1..30: mol_type = other RNA

SEQ ID NO: 529 - RNA, 30 nt, synthetic construct; identical to SEQ ID NO: 273
  misc_feature 1..30: note = Synthetic: WV-46453
  misc_feature 1..30: note = Synthetic: ADR-0104092
  modified_base 1: mod_base = cm
  modified_base 1..2: mod_base = OTHER; note R-N-(1,3-dimethylimidazolidin-2-ylidene)phosphoramidate
  modified_base 2: mod_base = cm
  modified_base 2..3: mod_base = OTHER; note = S-phosphorothioate
  modified_base 3: mod_base = cm
  modified_base 3..4: mod_base = OTHER; note = S-phosphorothioate
  modified_base 4: mod_base = OTHER; note = 2-fluororibose adenine
  modified_base 4..5: mod_base = OTHER; note = S-phosphorothioate
  modified_base 5: mod_base = OTHER; note = 2-fluororibose guanine
  modified_base 5..6: mod_base = OTHER; note = S-phosphorothioate
  modified_base 6: mod_base = OTHER; note = 2-O-methoxyethylribose 5-methyl-cytidine
  modified_base 7: mod_base = OTHER; note = 2-O-methylribose adenine
  modified_base 7..8: mod_base = OTHER; note = S-phosphorothioate
  modified_base 8: mod_base = OTHER; note = 2-fluororibose guanine
  modified_base 8..9: mod_base = OTHER; note = S-phosphorothioate
  modified_base 9: mod_base = OTHER; note = 2-fluororibose cytosine
  modified_base 10: mod_base = OTHER; note = 2-O-methoxyethylribose thymine
  modified_base 10..11: mod_base = OTHER; note = S-phosphorothioate
  modified_base 11: mod_base = OTHER; note = 2-fluororibose uracil
  modified_base 11..12: mod_base = OTHER; note R-N-(1,3-dimethylimidazolidin-2-ylidene)phosphoramidate
  modified_base 12: mod_base = cm
  modified_base 13: mod_base = OTHER; note = 2-fluororibose adenine
  modified_base 13..14: mod_base = OTHER; note = S-phosphorothioate
  modified_base 14: mod_base = OTHER; note = 2-fluororibose guanine
  modified_base 14..15: mod_base = OTHER; note R-N-(1,3-dimethylimidazolidin-2-ylidene)phosphoramidate
  modified_base 15: mod_base = OTHER; note = 2-fluororibose uracil
  modified_base 16: mod_base = cm
  modified_base 16..17: mod_base = OTHER; note = S-phosphorothioate
  modified_base 17: mod_base = OTHER; note = 2-fluororibose cytosine
  modified_base 17..18: mod_base = OTHER; note = S-phosphorothioate
  modified_base 18: mod_base = OTHER; note = 2-fluororibose cytosine
  modified_base 18..19: mod_base = OTHER; note = S-phosphorothioate
  modified_base 19: mod_base = OTHER; note = 2-fluororibose uracil
  modified_base 19..20: mod_base = OTHER; note = S-phosphorothioate
  modified_base 20: mod_base = OTHER; note = 2-O-methoxyethylribose thymine
  modified_base 21: mod_base = OTHER; note = 2-O-methoxyethylribose thymine
  modified_base 22: mod_base = OTHER; note = 2-fluororibose cytosine
  modified_base 22..23: mod_base = OTHER; note = S-phosphorothioate
  modified_base 23: mod_base = OTHER; note = deoxyribose thymine
  modified_base 23..24: mod_base = OTHER; note = S-phosphorothioate
  modified_base 24: mod_base = OTHER; note = deoxyribose uracil (position 3 connectivity)
  modified_base 24..25: mod_base = OTHER; note = S-phosphorothioate
  modified_base 25: mod_base = OTHER; note = deoxyribose inosine
  modified_base 25..26: mod_base = OTHER; note S-N-(1,3-dimethylimidazolidin-2-ylidene)phosphoramidate
  modified_base 26: mod_base = um
  modified_base 27: mod_base = OTHER; note = 2-fluororibose cytosine
  modified_base 27..28: mod_base = OTHER; note = S-phosphorothioate
  modified_base 28: mod_base = gm
  modified_base 28..29: mod_base = OTHER; note = S-phosphorothioate
  modified_base 29: mod_base = OTHER; note = 2-O-methylribose adenine
  modified_base 29..30: mod_base = OTHER; note R-N-(1,3-dimethylimidazolidin-2-ylidene)phosphoramidate
  modified_base 30: mod_base = um
  source 1..30: mol_type = other RNA

SEQ ID NO: 530 - RNA, 30 nt, synthetic construct; identical to SEQ ID NO: 273
  misc_feature 1..30: note = Synthetic: WV-47623
  misc_feature 1..30: note = Synthetic: ADR-0103948
  modified_base 1: mod_base = OTHER; note = 2-O-methoxyethylribose 5-methyl-cytidine
  modified_base 1..2: mod_base = OTHER; note R-N-(1,3-dimethylimidazolidin-2-ylidene)phosphoramidate
  modified_base 2: mod_base = OTHER; note = 2-O-methoxyethylribose 5-methyl-cytidine
  modified_base 2..3: mod_base = OTHER; note = S-phosphorothioate
  modified_base 3: mod_base = OTHER; note = 2-O-methoxyethylribose 5-methyl-cytidine
  modified_base 3..4: mod_base = OTHER; note = S-phosphorothioate
  modified_base 4: mod_base = OTHER; note = 2-fluororibose adenine
  modified_base 4..5: mod_base = OTHER; note = S-phosphorothioate
  modified_base 5: mod_base = OTHER; note = 2-fluororibose guanine
  modified_base 5..6: mod_base = OTHER; note = S-phosphorothioate
  modified_base 6: mod_base = OTHER; note = 2-O-methoxyethylribose 5-methyl-cytidine
  modified_base 7: mod_base = OTHER; note = 2-O-methylribose adenine
  modified_base 7..8: mod_base = OTHER; note = S-phosphorothioate
  modified_base 8: mod_base = OTHER; note = 2-fluororibose guanine
  modified_base 8..9: mod_base = OTHER; note = S-phosphorothioate
  modified_base 9: mod_base = OTHER; note = 2-fluororibose cytosine
  modified_base 10: mod_base = OTHER; note = 2-O-methoxyethylribose thymine
  modified_base 10..11: mod_base = OTHER; note = S-phosphorothioate
  modified_base 11: mod_base = OTHER; note = 2-fluororibose uracil
  modified_base 11..12: mod_base = OTHER; note R-N-(1,3-dimethylimidazolidin-2-ylidene)phosphoramidate
  modified_base 12: mod_base = cm
  modified_base 13: mod_base = OTHER; note = 2-fluororibose adenine
  modified_base 13..14: mod_base = OTHER; note = S-phosphorothioate
  modified_base 14: mod_base = OTHER; note = 2-fluororibose guanine
  modified_base 14..15: mod_base = OTHER; note R-N-(1,3-dimethylimidazolidin-2-ylidene)phosphoramidate
  modified_base 15: mod_base = OTHER; note = 2-fluororibose uracil
  modified_base 16: mod_base = cm
  modified_base 16..17: mod_base = OTHER; note = S-phosphorothioate
  modified_base 17: mod_base = OTHER; note = 2-fluororibose cytosine
  modified_base 17..18: mod_base = OTHER; note = S-phosphorothioate
  modified_base 18: mod_base = OTHER; note = 2-fluororibose cytosine
  modified_base 18..19: mod_base = OTHER; note = S-phosphorothioate
  modified_base 19: mod_base = OTHER; note = 2-fluororibose uracil
  modified_base 19..20: mod_base = OTHER; note = S-phosphorothioate
  modified_base 20: mod_base = OTHER; note = 2-O-methoxyethylribose thymine
  modified_base 21: mod_base = OTHER; note = 2-O-methoxyethylribose thymine
  modified_base 22: mod_base = OTHER; note = 2-fluororibose cytosine
  modified_base 22..23: mod_base = OTHER; note = S-phosphorothioate
  modified_base 23: mod_base = OTHER; note = deoxyribose thymine
  modified_base 23..24: mod_base = OTHER; note = S-phosphorothioate
  modified_base 24: mod_base = OTHER; note = deoxyribose uracil (position 3 connectivity)
  modified_base 24..25: mod_base = OTHER; note = S-phosphorothioate
  modified_base 25: mod_base = OTHER; note = deoxyribose inosine
  modified_base 25..26: mod_base = OTHER; note S-N-(1,3-dimethylimidazolidin-2-ylidene)phosphoramidate
  modified_base 26: mod_base = um
  modified_base 27: mod_base = OTHER; note = 2-fluororibose cytosine
  modified_base 27..28: mod_base = OTHER; note = S-phosphorothioate
  modified_base 28: mod_base = gm
  modified_base 28..29: mod_base = OTHER; note = S-phosphorothioate
  modified_base 29: mod_base = OTHER; note = 2-O-methoxyethylribose adenine
  modified_base 29..30: mod_base = OTHER; note R-N-(1,3-dimethylimidazolidin-2-ylidene)phosphoramidate
  modified_base 30: mod_base = OTHER; note = 2-O-methoxyethylribose thymine
  source 1..30: mol_type = other RNA

SEQ ID NO: 531 - RNA, 30 nt, synthetic construct; identical to SEQ ID NO: 273
  misc_feature 1..30: note = Synthetic: WV-47624
  misc_feature 1..30: note = Synthetic: ADR-0104095
  modified_base 1: mod_base = cm
  modified_base 1..2: mod_base = OTHER; note R-N-(1,3-dimethylimidazolidin-2-ylidene)phosphoramidate
  modified_base 2: mod_base = cm
  modified_base 2..3: mod_base = OTHER; note = S-phosphorothioate
  modified_base 3: mod_base = cm
  modified_base 3..4: mod_base = OTHER; note = S-phosphorothioate
  modified_base 4: mod_base = OTHER; note = 2-fluororibose adenine
  modified_base 4..5: mod_base = OTHER; note = S-phosphorothioate
  modified_base 5: mod_base = OTHER; note = 2-fluororibose guanine
  modified_base 5..6: mod_base = OTHER; note = S-phosphorothioate
  modified_base 6: mod_base = OTHER; note = 2-O-methoxyethylribose 5-methyl-cytidine
  modified_base 7: mod_base = OTHER; note = 2-O-methylribose adenine
  modified_base 7..8: mod_base = OTHER; note = S-phosphorothioate
  modified_base 8: mod_base = OTHER; note = 2-fluororibose guanine
  modified_base 8..9: mod_base = OTHER; note = S-phosphorothioate
  modified_base 9: mod_base = OTHER; note = 2-fluororibose cytosine
  modified_base 10: mod_base = OTHER; note = 2-O-methoxyethylribose thymine
  modified_base 10..11: mod_base = OTHER; note = S-phosphorothioate
  modified_base 11: mod_base = OTHER; note = 2-fluororibose uracil
  modified_base 11..12: mod_base = OTHER; note R-N-(1,3-dimethylimidazolidin-2-ylidene)phosphoramidate
  modified_base 12: mod_base = cm
  modified_base 13: mod_base = OTHER; note = 2-fluororibose adenine
  modified_base 13..14: mod_base = OTHER; note = S-phosphorothioate
  modified_base 14: mod_base = gm
  modified_base 14..15: mod_base = OTHER; note R-N-(1,3-dimethylimidazolidin-2-ylidene)phosphoramidate
  modified_base 15: mod_base = OTHER; note = 2-fluororibose uracil
  modified_base 16: mod_base = cm
  modified_base 16..17: mod_base = OTHER; note = S-phosphorothioate
  modified_base 17: mod_base = OTHER; note = 2-fluororibose cytosine
  modified_base 17..18: mod_base = OTHER; note = S-phosphorothioate
  modified_base 18: mod_base = OTHER; note = 2-fluororibose cytosine
  modified_base 18..19: mod_base = OTHER; note = S-phosphorothioate
  modified_base 19: mod_base = OTHER; note = 2-fluororibose uracil
  modified_base 19..20: mod_base = OTHER; note = S-phosphorothioate
  modified_base 20: mod_base = OTHER; note = 2-O-methoxyethylribose thymine
  modified_base 21: mod_base = OTHER; note = 2-O-methoxyethylribose thymine
  modified_base 22: mod_base = OTHER; note = 2-fluororibose cytosine
  modified_base 22..23: mod_base = OTHER; note = S-phosphorothioate
  modified_base 23: mod_base = OTHER; note = deoxyribose thymine
  modified_base 23..24: mod_base = OTHER; note = S-phosphorothioate
  modified_base 24: mod_base = OTHER; note = deoxyribose uracil (position 3 connectivity)
  modified_base 24..25: mod_base = OTHER; note = S-phosphorothioate
  modified_base 25: mod_base = OTHER; note = deoxyribose inosine
  modified_base 25..26: mod_base = OTHER; note S-N-(1,3-dimethylimidazolidin-2-ylidene)phosphoramidate
  modified_base 26: mod_base = um
  modified_base 27: mod_base = OTHER; note = 2-fluororibose cytosine
  modified_base 27..28: mod_base = OTHER; note = S-phosphorothioate
  modified_base 28: mod_base = gm
  modified_base 28..29: mod_base = OTHER; note = S-phosphorothioate
  modified_base 29: mod_base = OTHER; note = 2-O-methylribose adenine
  modified_base 29..30: mod_base = OTHER; note R-N-(1,3-dimethylimidazolidin-2-ylidene)phosphoramidate
  modified_base 30: mod_base = um
  source 1..30: mol_type = other RNA

SEQ ID NO: 532 - RNA, 30 nt, synthetic construct; identical to SEQ ID NO: 273
  misc_feature 1..30: note = Synthetic: WV-47625
  misc_feature 1..30: note = Synthetic: ADR-0103951
  modified_base 1: mod_base = OTHER; note = 2-O-methoxyethylribose 5-methyl-cytidine
  modified_base 1..2: mod_base = OTHER; note R-N-(1,3-dimethylimidazolidin-2-ylidene)phosphoramidate
  modified_base 2: mod_base = OTHER; note = 2-O-methoxyethylribose 5-methyl-cytidine
  modified_base 2..3: mod_base = OTHER; note = S-phosphorothioate
  modified_base 3: mod_base = OTHER; note = 2-O-methoxyethylribose 5-methyl-cytidine
  modified_base 3..4: mod_base = OTHER; note = S-phosphorothioate
  modified_base 4: mod_base = OTHER; note = 2-fluororibose adenine
  modified_base 4..5: mod_base = OTHER; note = S-phosphorothioate
  modified_base 5: mod_base = OTHER; note = 2-fluororibose guanine
  modified_base 5..6: mod_base = OTHER; note = S-phosphorothioate
  modified_base 6: mod_base = OTHER; note = 2-O-methoxyethylribose 5-methyl-cytidine
  modified_base 7: mod_base = OTHER; note = 2-O-methylribose adenine
  modified_base 7..8: mod_base = OTHER; note = S-phosphorothioate
  modified_base 8: mod_base = OTHER; note = 2-fluororibose guanine
  modified_base 8..9: mod_base = OTHER; note = S-phosphorothioate
  modified_base 9: mod_base = OTHER; note = 2-fluororibose cytosine
  modified_base 10: mod_base = OTHER; note = 2-O-methoxyethylribose thymine
  modified_base 10..11: mod_base = OTHER; note = S-phosphorothioate
  modified_base 11: mod_base = OTHER; note = 2-fluororibose uracil
  modified_base 11..12: mod_base = OTHER; note R-N-(1,3-dimethylimidazolidin-2-ylidene)phosphoramidate
  modified_base 12: mod_base = cm
  modified_base 13: mod_base = OTHER; note = 2-fluororibose adenine
  modified_base 13..14: mod_base = OTHER; note = S-phosphorothioate
  modified_base 14: mod_base = gm
  modified_base 14..15: mod_base = OTHER; note R-N-(1,3-dimethylimidazolidin-2-ylidene)phosphoramidate
  modified_base 15: mod_base = OTHER; note = 2-fluororibose uracil
  modified_base 16: mod_base = cm
  modified_base 16..17: mod_base = OTHER; note = S-phosphorothioate
  modified_base 17: mod_base = OTHER; note = 2-fluororibose cytosine
  modified_base 17..18: mod_base = OTHER; note = S-phosphorothioate
  modified_base 18: mod_base = OTHER; note = 2-fluororibose cytosine
  modified_base 18..19: mod_base = OTHER; note = S-phosphorothioate
  modified_base 19: mod_base = OTHER; note = 2-fluororibose uracil
  modified_base 19..20: mod_base = OTHER; note = S-phosphorothioate
  modified_base 20: mod_base = OTHER; note = 2-O-methoxyethylribose thymine
  modified_base 21: mod_base = OTHER; note = 2-O-methoxyethylribose thymine
  modified_base 22: mod_base = OTHER; note = 2-fluororibose cytosine
  modified_base 22..23: mod_base = OTHER; note = S-phosphorothioate
  modified_base 23: mod_base = OTHER; note = deoxyribose thymine
  modified_base 23..24: mod_base = OTHER; note = S-phosphorothioate
  modified_base 24: mod_base = OTHER; note = deoxyribose uracil (position 3 connectivity)
  modified_base 24..25: mod_base = OTHER; note = S-phosphorothioate
  modified_base 25: mod_base = OTHER; note = deoxyribose inosine
  modified_base 25..26: mod_base = OTHER; note S-N-(1,3-dimethylimidazolidin-2-ylidene)phosphoramidate
  modified_base 26: mod_base = um
  modified_base 27: mod_base = OTHER; note = 2-fluororibose cytosine
  modified_base 27..28: mod_base = OTHER; note = S-phosphorothioate
  modified_base 28: mod_base = gm
  modified_base 28..29: mod_base = OTHER; note = S-phosphorothioate
  modified_base 29: mod_base = OTHER; note = 2-O-methoxyethylribose adenine
  modified_base 29..30: mod_base = OTHER; note R-N-(1,3-dimethylimidazolidin-2-ylidene)phosphoramidate
  modified_base 30: mod_base = OTHER; note = 2-O-methoxyethylribose thymine
  source 1..30: mol_type = other RNA

SEQ ID NO: 533 - RNA, 30 nt, synthetic construct; identical to SEQ ID NO: 273
  misc_feature 1..30: note = Synthetic: WV-46457
  misc_feature 1..30: note = Synthetic: ADR-0104104
  modified_base 1: mod_base = cm
  modified_base 1..2: mod_base = OTHER; note R-N-(1,3-dimethylimidazolidin-2-ylidene)phosphoramidate
  modified_base 2: mod_base = cm
  modified_base 2..3: mod_base = OTHER; note = S-phosphorothioate
  modified_base 3: mod_base = cm
  modified_base 3..4: mod_base = OTHER; note = S-phosphorothioate
  modified_base 4: mod_base = OTHER; note = 2-fluororibose adenine
  modified_base 4..5: mod_base = OTHER; note = S-phosphorothioate
  modified_base 5: mod_base = OTHER; note = 2-fluororibose guanine
  modified_base 5..6: mod_base = OTHER; note = S-phosphorothioate
  modified_base 6: mod_base = OTHER; note = 2-O-methoxyethylribose 5-methyl-cytidine
  modified_base 7: mod_base = OTHER; note = 2-O-methylribose adenine
  modified_base 8: mod_base = OTHER; note = 2-fluororibose guanine
  modified_base 8..9: mod_base = OTHER; note = S-phosphorothioate
  modified_base 9: mod_base = OTHER; note = 2-fluororibose cytosine
  modified_base 9..10: mod_base = OTHER; note = S-phosphorothioate
  modified_base 10: mod_base = OTHER; note = 2-O-methoxyethylribose thymine
  modified_base 11: mod_base = OTHER; note = 2-fluororibose uracil
  modified_base 11..12: mod_base = OTHER; note R-N-(1,3-dimethylimidazolidin-2-ylidene)phosphoramidate
  modified_base 12: mod_base = cm
  modified_base 13: mod_base = OTHER; note = 2-fluororibose adenine
  modified_base 13..14: mod_base = OTHER; note = S-phosphorothioate
  modified_base 14: mod_base = OTHER; note = 2-fluororibose guanine
  modified_base 14..15: mod_base = OTHER; note R-N-(1,3-dimethylimidazolidin-2-ylidene)phosphoramidate
  modified_base 15: mod_base = OTHER; note = 2-fluororibose uracil
  modified_base 16: mod_base = cm
  modified_base 16..17: mod_base = OTHER; note = S-phosphorothioate
  modified_base 17: mod_base = OTHER; note = 2-fluororibose cytosine
  modified_base 17..18: mod_base = OTHER; note = S-phosphorothioate
  modified_base 18: mod_base = OTHER; note = 2-fluororibose cytosine
  modified_base 18..19: mod_base = OTHER; note = S-phosphorothioate
  modified_base 19: mod_base = OTHER; note = 2-fluororibose uracil
  modified_base 19..20: mod_base = OTHER; note R-N-(1,3-dimethylimidazolidin-2-ylidene)phosphoramidate
  modified_base 20: mod_base = um
  modified_base 21: mod_base = OTHER; note = 2-O-methoxyethylribose thymine
  modified_base 22: mod_base = OTHER; note = 2-fluororibose cytosine
  modified_base 22..23: mod_base = OTHER; note = S-phosphorothioate
  modified_base 23: mod_base = OTHER; note = deoxyribose thymine
  modified_base 23..24: mod_base = OTHER; note = S-phosphorothioate
  modified_base 24: mod_base = OTHER; note = deoxyribose uracil (position 3 connectivity)
  modified_base 24..25: mod_base = OTHER; note = S-phosphorothioate
  modified_base 25: mod_base = OTHER; note = deoxyribose inosine
  modified_base 25..26: mod_base = OTHER; note S-N-(1,3-dimethylimidazolidin-2-ylidene)phosphoramidate
  modified_base 26: mod_base = um
  modified_base 27: mod_base = OTHER; note = 2-fluororibose cytosine
  modified_base 27..28: mod_base = OTHER; note = S-phosphorothioate
  modified_base 28: mod_base = gm
  modified_base 28..29: mod_base = OTHER; note = S-phosphorothioate
  modified_base 29: mod_base = OTHER; note = 2-O-methylribose adenine
  modified_base 29..30: mod_base = OTHER; note R-N-(1,3-dimethylimidazolidin-2-ylidene)phosphoramidate
  modified_base 30: mod_base = um
  source 1..30: mol_type = other RNA

SEQ ID NO: 534 - RNA, 30 nt, synthetic construct; identical to SEQ ID NO: 273
  misc_feature 1..30: note = Synthetic: WV-47626
  misc_feature 1..30: note = Synthetic: ADR-0103958
  modified_base 1: mod_base = OTHER; note = 2-O-methoxyethylribose 5-methyl-cytidine
  modified_base 1..2: mod_base = OTHER; note R-N-(1,3-dimethylimidazolidin-2-ylidene)phosphoramidate
  modified_base 2: mod_base = OTHER; note = 2-O-methoxyethylribose 5-methyl-cytidine
  modified_base 2..3: mod_base = OTHER; note = S-phosphorothioate
  modified_base 3: mod_base = OTHER; note = 2-O-methoxyethylribose 5-methyl-cytidine
  modified_base 3..4: mod_base = OTHER; note = S-phosphorothioate
  modified_base 4: mod_base = OTHER; note = 2-fluororibose adenine
  modified_base 4..5: mod_base = OTHER; note = S-phosphorothioate
  modified_base 5: mod_base = OTHER; note = 2-fluororibose guanine
  modified_base 5..6: mod_base = OTHER; note = S-phosphorothioate
  modified_base 6: mod_base = OTHER; note = 2-O-methoxyethylribose 5-methyl-cytidine
  modified_base 7: mod_base = OTHER; note = 2-O-methylribose adenine
  modified_base 8: mod_base = OTHER; note = 2-fluororibose guanine
  modified_base 8..9: mod_base = OTHER; note = S-phosphorothioate
  modified_base 9: mod_base = OTHER; note = 2-fluororibose cytosine
  modified_base 9..10: mod_base = OTHER; note = S-phosphorothioate
  modified_base 10: mod_base = OTHER; note = 2-O-methoxyethylribose thymine
  modified_base 11: mod_base = OTHER; note = 2-fluororibose uracil
  modified_base 11..12: mod_base = OTHER; note R-N-(1,3-dimethylimidazolidin-2-ylidene)phosphoramidate
  modified_base 12: mod_base = cm
  modified_base 13: mod_base = OTHER; note = 2-fluororibose adenine
  modified_base 13..14: mod_base = OTHER; note = S-phosphorothioate
  modified_base 14: mod_base = OTHER; note = 2-fluororibose guanine
  modified_base 14..15: mod_base = OTHER; note R-N-(1,3-dimethylimidazolidin-2-ylidene)phosphoramidate
  modified_base 15: mod_base = OTHER; note = 2-fluororibose uracil
  modified_base 16: mod_base = cm
  modified_base 16..17: mod_base = OTHER; note = S-phosphorothioate
  modified_base 17: mod_base = OTHER; note = 2-fluororibose cytosine
  modified_base 17..18: mod_base = OTHER; note = S-phosphorothioate
  modified_base 18: mod_base = OTHER; note = 2-fluororibose cytosine
  modified_base 18..19: mod_base = OTHER; note = S-phosphorothioate
  modified_base 19: mod_base = OTHER; note = 2-fluororibose uracil
  modified_base 19..20: mod_base = OTHER; note R-N-(1,3-dimethylimidazolidin-2-ylidene)phosphoramidate
  modified_base 20: mod_base = um
  modified_base 21: mod_base = OTHER; note = 2-O-methoxyethylribose thymine
  modified_base 22: mod_base = OTHER; note = 2-fluororibose cytosine
  modified_base 22..23: mod_base = OTHER; note = S-phosphorothioate
  modified_base 23: mod_base = OTHER; note = deoxyribose thymine
  modified_base 23..24: mod_base = OTHER; note = S-phosphorothioate
  modified_base 24: mod_base = OTHER; note = deoxyribose uracil (position 3 connectivity)
  modified_base 24..25: mod_base = OTHER; note = S-phosphorothioate
  modified_base 25: mod_base = OTHER; note = deoxyribose inosine
  modified_base 25..26: mod_base = OTHER; note S-N-(1,3-dimethylimidazolidin-2-ylidene)phosphoramidate
  modified_base 26: mod_base = um
  modified_base 27: mod_base = OTHER; note = 2-fluororibose cytosine
  modified_base 27..28: mod_base = OTHER; note = S-phosphorothioate
  modified_base 28: mod_base = gm
  modified_base 28..29: mod_base = OTHER; note = S-phosphorothioate
  modified_base 29: mod_base = OTHER; note = 2-O-methoxyethylribose adenine
  modified_base 29..30: mod_base = OTHER; note R-N-(1,3-dimethylimidazolidin-2-ylidene)phosphoramidate
  modified_base 30: mod_base = OTHER; note = 2-O-methoxyethylribose thymine
  source 1..30: mol_type = other RNA

SEQ ID NO: 535 - RNA, 30 nt, synthetic construct; identical to SEQ ID NO: 273
  misc_feature 1..30: note = Synthetic: WV-47627
  misc_feature 1..30: note = Synthetic: ADR-0104105
  modified_base 1: mod_base = cm
  modified_base 1..2: mod_base = OTHER; note R-N-(1,3-dimethylimidazolidin-2-ylidene)phosphoramidate
  modified_base 2: mod_base = cm
  modified_base 2..3: mod_base = OTHER; note = S-phosphorothioate
  modified_base 3: mod_base = cm
  modified_base 3..4: mod_base = OTHER; note = S-phosphorothioate
  modified_base 4: mod_base = OTHER; note = 2-fluororibose adenine
  modified_base 4..5: mod_base = OTHER; note = S-phosphorothioate
  modified_base 5: mod_base = OTHER; note = 2-fluororibose guanine
  modified_base 5..6: mod_base = OTHER; note = S-phosphorothioate
  modified_base 6: mod_base = OTHER; note = 2-O-methoxyethylribose 5-methyl-cytidine
  modified_base 7: mod_base = OTHER; note = 2-O-methylribose adenine
  modified_base 8: mod_base = OTHER; note = 2-fluororibose guanine
  modified_base 8..9: mod_base = OTHER; note = S-phosphorothioate
  modified_base 9: mod_base = OTHER; note = 2-fluororibose cytosine
  modified_base 9..10: mod_base = OTHER; note = S-phosphorothioate
  modified_base 10: mod_base = OTHER; note = 2-O-methoxyethylribose thymine
  modified_base 11: mod_base = OTHER; note = 2-fluororibose uracil
  modified_base 11..12: mod_base = OTHER; note R-N-(1,3-dimethylimidazolidin-2-ylidene)phosphoramidate
  modified_base 12: mod_base = cm
  modified_base 13: mod_base = OTHER; note = 2-fluororibose adenine
  modified_base 13..14: mod_base = OTHER; note = S-phosphorothioate
  modified_base 14: mod_base = gm
  modified_base 14..15: mod_base = OTHER; note R-N-(1,3-dimethylimidazolidin-2-ylidene)phosphoramidate
  modified_base 15: mod_base = OTHER; note = 2-fluororibose uracil
  modified_base 16: mod_base = cm
  modified_base 16..17: mod_base = OTHER; note = S-phosphorothioate
  modified_base 17: mod_base = OTHER; note = 2-fluororibose cytosine
  modified_base 17..18: mod_base = OTHER; note = S-phosphorothioate
  modified_base 18: mod_base = OTHER; note = 2-fluororibose cytosine
  modified_base 18..19: mod_base = OTHER; note = S-phosphorothioate
  modified_base 19: mod_base = OTHER; note = 2-fluororibose uracil
  modified_base 19..20: mod_base = OTHER; note R-N-(1,3-dimethylimidazolidin-2-ylidene)phosphoramidate
  modified_base 20: mod_base = um
  modified_base 21: mod_base = OTHER; note = 2-O-methoxyethylribose thymine
  modified_base 22: mod_base = OTHER; note = 2-fluororibose cytosine
  modified_base 22..23: mod_base = OTHER; note = S-phosphorothioate
  modified_base 23: mod_base = OTHER; note = deoxyribose thymine
  modified_base 23..24: mod_base = OTHER; note = S-phosphorothioate
  modified_base 24: mod_base = OTHER; note = deoxyribose uracil (position 3 connectivity)
  modified_base 24..25: mod_base = OTHER; note = S-phosphorothioate
  modified_base 25: mod_base = OTHER; note = deoxyribose inosine
  modified_base 25..26: mod_base = OTHER; note S-N-(1,3-dimethylimidazolidin-2-ylidene)phosphoramidate
  modified_base 26: mod_base = um
  modified_base 27: mod_base = OTHER; note = 2-fluororibose cytosine
  modified_base 27..28: mod_base = OTHER; note = S-phosphorothioate
  modified_base 28: mod_base = gm
  modified_base 28..29: mod_base = OTHER; note = S-phosphorothioate
  modified_base 29: mod_base = OTHER; note = 2-O-methylribose adenine
  modified_base 29..30: mod_base = OTHER; note R-N-(1,3-dimethylimidazolidin-2-ylidene)phosphoramidate
  modified_base 30: mod_base = um
  source 1..30: mol_type = other RNA

SEQ ID NO: 536 - RNA, 30 nt, synthetic construct; identical to SEQ ID NO: 273
  misc_feature 1..30: note = Synthetic: WV-47628
  misc_feature 1..30: note = Synthetic: ADR-0103959
  modified_base 1: mod_base = OTHER; note = 2-O-methoxyethylribose 5-methyl-cytidine
  modified_base 1..2: mod_base = OTHER; note R-N-(1,3-dimethylimidazolidin-2-ylidene)phosphoramidate
  modified_base 2: mod_base = OTHER; note = 2-O-methoxyethylribose 5-methyl-cytidine
  modified_base 2..3: mod_base = OTHER; note = S-phosphorothioate
  modified_base 3: mod_base = OTHER; note = 2-O-methoxyethylribose 5-methyl-cytidine
  modified_base 3..4: mod_base = OTHER; note = S-phosphorothioate
  modified_base 4: mod_base = OTHER; note = 2-fluororibose adenine
  modified_base 4..5: mod_base = OTHER; note = S-phosphorothioate
  modified_base 5: mod_base = OTHER; note = 2-fluororibose guanine
  modified_base 5..6: mod_base = OTHER; note = S-phosphorothioate
  modified_base 6: mod_base = OTHER; note = 2-O-methoxyethylribose 5-methyl-cytidine
  modified_base 7: mod_base = OTHER; note = 2-O-methylribose adenine
  modified_base 8: mod_base = OTHER; note = 2-fluororibose guanine
  modified_base 8..9: mod_base = OTHER; note = S-phosphorothioate
  modified_base 9: mod_base = OTHER; note = 2-fluororibose cytosine
  modified_base 9..10: mod_base = OTHER; note = S-phosphorothioate
  modified_base 10: mod_base = OTHER; note = 2-O-methoxyethylribose thymine
  modified_base 11: mod_base = OTHER; note = 2-fluororibose uracil
  modified_base 11..12: mod_base = OTHER; note R-N-(1,3-dimethylimidazolidin-2-ylidene)phosphoramidate
  modified_base 12: mod_base = cm
  modified_base 13: mod_base = OTHER; note = 2-fluororibose adenine
  modified_base 13..14: mod_base = OTHER; note = S-phosphorothioate
  modified_base 14: mod_base = gm
  modified_base 14..15: mod_base = OTHER; note R-N-(1,3-dimethylimidazolidin-2-ylidene)phosphoramidate
  modified_base 15: mod_base = OTHER; note = 2-fluororibose uracil
  modified_base 16: mod_base = cm
  modified_base 16..17: mod_base = OTHER; note = S-phosphorothioate
  modified_base 17: mod_base = OTHER; note = 2-fluororibose cytosine
  modified_base 17..18: mod_base = OTHER; note = S-phosphorothioate
  modified_base 18: mod_base = OTHER; note = 2-fluororibose cytosine
  modified_base 18..19: mod_base = OTHER; note = S-phosphorothioate
  modified_base 19: mod_base = OTHER; note = 2-fluororibose uracil
  modified_base 19..20: mod_base = OTHER; note R-N-(1,3-dimethylimidazolidin-2-ylidene)phosphoramidate
  modified_base 20: mod_base = um
  modified_base 21: mod_base = OTHER; note = 2-O-methoxyethylribose thymine
  modified_base 22: mod_base = OTHER; note = 2-fluororibose cytosine
  modified_base 22..23: mod_base = OTHER; note = S-phosphorothioate
  modified_base 23: mod_base = OTHER; note = deoxyribose thymine
  modified_base 23..24: mod_base = OTHER; note = S-phosphorothioate
  modified_base 24: mod_base = OTHER; note = deoxyribose uracil (position 3 connectivity)
  modified_base 24..25: mod_base = OTHER; note = S-phosphorothioate
  modified_base 25: mod_base = OTHER; note = deoxyribose inosine
  modified_base 25..26: mod_base = OTHER; note S-N-(1,3-dimethylimidazolidin-2-ylidene)phosphoramidate
  modified_base 26: mod_base = um
  modified_base 27: mod_base = OTHER; note = 2-fluororibose cytosine
  modified_base 27..28: mod_base = OTHER; note = S-phosphorothioate
  modified_base 28: mod_base = gm
  modified_base 28..29: mod_base = OTHER; note = S-phosphorothioate
  modified_base 29: mod_base = OTHER; note = 2-O-methoxyethylribose adenine
  modified_base 29..30: mod_base = OTHER; note R-N-(1,3-dimethylimidazolidin-2-ylidene)phosphoramidate
  modified_base 30: mod_base = OTHER; note = 2-O-methoxyethylribose thymine
  source 1..30: mol_type = other RNA

SEQ ID NO: 537 - RNA, 30 nt, synthetic construct; identical to SEQ ID NO: 273
  misc_feature 1..30: note = Synthetic: WV-47629
  misc_feature 1..30: note = Synthetic: ADR-0103950
  modified_base 1: mod_base = OTHER; note = 2-O-methoxyethylribose 5-methyl-cytidine
  modified_base 1..2: mod_base = OTHER; note R-N-(1,3-dimethylimidazolidin-2-ylidene)phosphoramidate
  modified_base 2: mod_base = OTHER; note = 2-O-methoxyethylribose 5-methyl-cytidine
  modified_base 2..3: mod_base = OTHER; note = S-phosphorothioate
  modified_base 3: mod_base = OTHER; note = 2-O-methoxyethylribose 5-methyl-cytidine
  modified_base 3..4: mod_base = OTHER; note = S-phosphorothioate
  modified_base 4: mod_base = OTHER; note = 2-fluororibose adenine
  modified_base 4..5: mod_base = OTHER; note = S-phosphorothioate
  modified_base 5: mod_base = OTHER; note = 2-fluororibose guanine
  modified_base 5..6: mod_base = OTHER; note = S-phosphorothioate
  modified_base 6: mod_base = OTHER; note = 2-O-methoxyethylribose 5-methyl-cytidine
  modified_base 7: mod_base = OTHER; note = 2-O-methylribose adenine
  modified_base 7..8: mod_base = OTHER; note = S-phosphorothioate
  modified_base 8: mod_base = OTHER; note = 2-fluororibose guanine
  modified_base 8..9: mod_base = OTHER; note = S-phosphorothioate
  modified_base 9: mod_base = OTHER; note = 2-fluororibose cytosine
  modified_base 10: mod_base = OTHER; note = 2-O-methoxyethylribose thymine
  modified_base 10..11: mod_base = OTHER; note = S-phosphorothioate
  modified_base 11: mod_base = OTHER; note = 2-fluororibose uracil
  modified_base 11..12: mod_base = OTHER; note R-N-(1,3-dimethylimidazolidin-2-ylidene)phosphoramidate
  modified_base 12: mod_base = cm
  modified_base 13: mod_base = OTHER; note = 2-fluororibose adenine
  modified_base 13..14: mod_base = OTHER; note = S-phosphorothioate
  modified_base 14: mod_base = OTHER; note = 2-fluororibose guanine
  modified_base 14..15: mod_base = OTHER; note R-N-(1,3-dimethylimidazolidin-2-ylidene)phosphoramidate
  modified_base 15: mod_base = OTHER; note = 2-fluororibose uracil
  modified_base 16: mod_base = cm
  modified_base 16..17: mod_base = OTHER; note = S-phosphorothioate
  modified_base 17: mod_base = OTHER; note = 2-fluororibose cytosine
  modified_base 17..18: mod_base = OTHER; note = S-phosphorothioate
  modified_base 18: mod_base = OTHER; note = 2-fluororibose cytosine
  modified_base 18..19: mod_base = OTHER; note = S-phosphorothioate
  modified_base 19: mod_base = OTHER; note = 2-fluororibose uracil
  modified_base 19..20: mod_base = OTHER; note R-N-(1,3-dimethylimidazolidin-2-ylidene)phosphoramidate
  modified_base 20: mod_base = um
  modified_base 20..21: mod_base = OTHER; note = S-phosphorothioate
  modified_base 21: mod_base = OTHER; note = 2-O-methoxyethylribose thymine
  modified_base 22: mod_base = OTHER; note = 2-fluororibose cytosine
  modified_base 22..23: mod_base = OTHER; note = S-phosphorothioate
  modified_base 23: mod_base = OTHER; note = deoxyribose thymine
  modified_base 23..24: mod_base = OTHER; note = S-phosphorothioate
  modified_base 24: mod_base = OTHER; note = deoxyribose uracil (position 3 connectivity)
  modified_base 24..25: mod_base = OTHER; note = S-phosphorothioate
  modified_base 25: mod_base = OTHER; note = deoxyribose inosine
  modified_base 25..26: mod_base = OTHER; note S-N-(1,3-dimethylimidazolidin-2-ylidene)phosphoramidate
  modified_base 26: mod_base = um
  modified_base 27: mod_base = OTHER; note = 2-fluororibose cytosine
  modified_base 27..28: mod_base = OTHER; note = S-phosphorothioate
  modified_base 28: mod_base = gm
  modified_base 28..29: mod_base = OTHER; note = S-phosphorothioate
  modified_base 29: mod_base = OTHER; note = 2-O-methoxyethylribose adenine
  modified_base 29..30: mod_base = OTHER; note R-N-(1,3-dimethylimidazolidin-2-ylidene)phosphoramidate
  modified_base 30: mod_base = OTHER; note = 2-O-methoxyethylribose thymine
  source 1..30: mol_type = other RNA

SEQ ID NO: 538 - RNA, 30 nt, synthetic construct; identical to SEQ ID NO: 273
  misc_feature 1..30: note = Synthetic: WV-47630
  misc_feature 1..30: note = Synthetic: ADR-0104097
  modified_base 1: mod_base = cm
  modified_base 1..2: mod_base = OTHER; note R-N-(1,3-dimethylimidazolidin-2-ylidene)phosphoramidate
  modified_base 2: mod_base = cm
  modified_base 2..3: mod_base = OTHER; note = S-phosphorothioate
  modified_base 3: mod_base = cm
  modified_base 3..4: mod_base = OTHER; note = S-phosphorothioate
  modified_base 4: mod_base = OTHER; note = 2-fluororibose adenine
  modified_base 4..5: mod_base = OTHER; note = S-phosphorothioate
  modified_base 5: mod_base = OTHER; note = 2-fluororibose guanine
  modified_base 5..6: mod_base = OTHER; note = S-phosphorothioate
  modified_base 6: mod_base = OTHER; note = 2-O-methoxyethylribose 5-methyl-cytidine
  modified_base 7: mod_base = OTHER; note = 2-O-methylribose adenine
  modified_base 7..8: mod_base = OTHER; note = S-phosphorothioate
  modified_base 8: mod_base = OTHER; note = 2-fluororibose guanine
  modified_base 8..9: mod_base = OTHER; note = S-phosphorothioate
  modified_base 9: mod_base = OTHER; note = 2-fluororibose cytosine
  modified_base 10: mod_base = OTHER; note = 2-O-methoxyethylribose thymine
  modified_base 10..11: mod_base = OTHER; note = S-phosphorothioate
  modified_base 11: mod_base = OTHER; note = 2-fluororibose uracil
  modified_base 11..12: mod_base = OTHER; note R-N-(1,3-dimethylimidazolidin-2-ylidene)phosphoramidate
  modified_base 12: mod_base = cm
  modified_base 13: mod_base = OTHER; note = 2-fluororibose adenine
  modified_base 13..14: mod_base = OTHER; note = S-phosphorothioate
  modified_base 14: mod_base = gm
  modified_base 14..15: mod_base = OTHER; note R-N-(1,3-dimethylimidazolidin-2-ylidene)phosphoramidate
  modified_base 15: mod_base = OTHER; note = 2-fluororibose uracil
  modified_base 16: mod_base = cm
  modified_base 16..17: mod_base = OTHER; note = S-phosphorothioate
  modified_base 17: mod_base = OTHER; note = 2-fluororibose cytosine
  modified_base 17..18: mod_base = OTHER; note = S-phosphorothioate
  modified_base 18: mod_base = OTHER; note = 2-fluororibose cytosine
  modified_base 18..19: mod_base = OTHER; note = S-phosphorothioate
  modified_base 19: mod_base = OTHER; note = 2-fluororibose uracil
  modified_base 19..20: mod_base = OTHER; note R-N-(1,3-dimethylimidazolidin-2-ylidene)phosphoramidate
  modified_base 20: mod_base = um
  modified_base 20..21: mod_base = OTHER; note = S-phosphorothioate
  modified_base 21: mod_base = OTHER; note = 2-O-methoxyethylribose thymine
  modified_base 22: mod_base = OTHER; note = 2-fluororibose cytosine
  modified_base 22..23: mod_base = OTHER; note = S-phosphorothioate
  modified_base 23: mod_base = OTHER; note = deoxyribose thymine
  modified_base 23..24: mod_base = OTHER; note = S-phosphorothioate
  modified_base 24: mod_base = OTHER; note = deoxyribose uracil (position 3 connectivity)
  modified_base 24..25: mod_base = OTHER; note = S-phosphorothioate
  modified_base 25: mod_base = OTHER; note = deoxyribose inosine
  modified_base 25..26: mod_base = OTHER; note S-N-(1,3-dimethylimidazolidin-2-ylidene)phosphoramidate
  modified_base 26: mod_base = um
  modified_base 27: mod_base = OTHER; note = 2-fluororibose cytosine
  modified_base 27..28: mod_base = OTHER; note = S-phosphorothioate
  modified_base 28: mod_base = gm
  modified_base 28..29: mod_base = OTHER; note = S-phosphorothioate
  modified_base 29: mod_base = OTHER; note = 2-O-methylribose adenine
  modified_base 29..30: mod_base = OTHER; note R-N-(1,3-dimethylimidazolidin-2-ylidene)phosphoramidate
  modified_base 30: mod_base = um
  source 1..30: mol_type = other RNA

SEQ ID NO: 539 - RNA, 30 nt, synthetic construct; identical to SEQ ID NO: 273
  misc_feature 1..30: note = Synthetic: WV-47631
  misc_feature 1..30: note = Synthetic: ADR-0103953
  modified_base 1: mod_base = OTHER; note = 2-O-methoxyethylribose 5-methyl-cytidine
  modified_base 1..2: mod_base = OTHER; note R-N-(1,3-dimethylimidazolidin-2-ylidene)phosphoramidate
  modified_base 2: mod_base = OTHER; note = 2-O-methoxyethylribose 5-methyl-cytidine
  modified_base 2..3: mod_base = OTHER; note = S-phosphorothioate
  modified_base 3: mod_base = OTHER; note = 2-O-methoxyethylribose 5-methyl-cytidine
  modified_base 3..4: mod_base = OTHER; note = S-phosphorothioate
  modified_base 4: mod_base = OTHER; note = 2-fluororibose adenine
  modified_base 4..5: mod_base = OTHER; note = S-phosphorothioate
  modified_base 5: mod_base = OTHER; note = 2-fluororibose guanine
  modified_base 5..6: mod_base = OTHER; note = S-phosphorothioate
  modified_base 6: mod_base = OTHER; note = 2-O-methoxyethylribose 5-methyl-cytidine
  modified_base 7: mod_base = OTHER; note = 2-O-methylribose adenine
  modified_base 7..8: mod_base = OTHER; note = S-phosphorothioate
  modified_base 8: mod_base = OTHER; note = 2-fluororibose guanine
  modified_base 8..9: mod_base = OTHER; note = S-phosphorothioate
  modified_base 9: mod_base = OTHER; note = 2-fluororibose cytosine
  modified_base 10: mod_base = OTHER; note = 2-O-methoxyethylribose thymine
  modified_base 10..11: mod_base = OTHER; note = S-phosphorothioate
  modified_base 11: mod_base = OTHER; note = 2-fluororibose uracil
  modified_base 11..12: mod_base = OTHER; note R-N-(1,3-dimethylimidazolidin-2-ylidene)phosphoramidate
  modified_base 12: mod_base = cm
  modified_base 13: mod_base = OTHER; note = 2-fluororibose adenine
  modified_base 13..14: mod_base = OTHER; note = S-phosphorothioate
  modified_base 14: mod_base = gm
  modified_base 14..15: mod_base = OTHER; note R-N-(1,3-dimethylimidazolidin-2-ylidene)phosphoramidate
  modified_base 15: mod_base = OTHER; note = 2-fluororibose uracil
  modified_base 16: mod_base = cm
  modified_base 16..17: mod_base = OTHER; note = S-phosphorothioate
  modified_base 17: mod_base = OTHER; note = 2-fluororibose cytosine
  modified_base 17..18: mod_base = OTHER; note = S-phosphorothioate
  modified_base 18: mod_base = OTHER; note = 2-fluororibose cytosine
  modified_base 18..19: mod_base = OTHER; note = S-phosphorothioate
  modified_base 19: mod_base = OTHER; note = 2-fluororibose uracil
  modified_base 19..20: mod_base = OTHER; note R-N-(1,3-dimethylimidazolidin-2-ylidene)phosphoramidate
  modified_base 20: mod_base = um
  modified_base 20..21: mod_base = OTHER; note = S-phosphorothioate
  modified_base 21: mod_base = OTHER; note = 2-O-methoxyethylribose thymine
  modified_base 22: mod_base = OTHER; note = 2-fluororibose cytosine
  modified_base 22..23: mod_base = OTHER; note = S-phosphorothioate
  modified_base 23: mod_base = OTHER; note = deoxyribose thymine
  modified_base 23..24: mod_base = OTHER; note = S-phosphorothioate
  modified_base 24: mod_base = OTHER; note = deoxyribose uracil (position 3 connectivity)
  modified_base 24..25: mod_base = OTHER; note = S-phosphorothioate
  modified_base 25: mod_base = OTHER; note = deoxyribose inosine
  modified_base 25..26: mod_base = OTHER; note S-N-(1,3-dimethylimidazolidin-2-ylidene)phosphoramidate
  modified_base 26: mod_base = um
  modified_base 27: mod_base = OTHER; note = 2-fluororibose cytosine
  modified_base 27..28: mod_base = OTHER; note = S-phosphorothioate
  modified_base 28: mod_base = gm
  modified_base 28..29: mod_base = OTHER; note = S-phosphorothioate
  modified_base 29: mod_base = OTHER; note = 2-O-methoxyethylribose adenine
  modified_base 29..30: mod_base = OTHER; note R-N-(1,3-dimethylimidazolidin-2-ylidene)phosphoramidate
  modified_base 30: mod_base = OTHER; note = 2-O-methoxyethylribose thymine
  source 1..30: mol_type = other RNA

SEQ ID NO: 540 - RNA, 30 nt, synthetic construct; identical to SEQ ID NO: 134
  misc_feature 1..30: note = Synthetic: WV-47641
  misc_feature 1..30: note = Synthetic: ADR-0100570
  modified_base 1: mod_base = OTHER; note = biotin linked to 3-(3-aminopropoxy)propane-1,2-diol linked by phosphorothioate to the 5' end of 2-O-methylribose cytosine
  modified_base 2: mod_base = cm
  modified_base 3: mod_base = cm
  modified_base 4: mod_base = OTHER; note = 2-fluororibose adenine
  modified_base 5: mod_base = OTHER; note = 2-fluororibose guanine
  modified_base 6: mod_base = cm
  modified_base 7: mod_base = OTHER; note = 2-fluororibose adenine
  modified_base 8: mod_base = OTHER; note = 2-fluororibose guanine
  modified_base 9: mod_base = OTHER; note = 2-fluororibose cytosine
  modified_base 10: mod_base = OTHER; note = 2-fluororibose uracil
  modified_base 11: mod_base = OTHER; note = 2-fluororibose uracil
  modified_base 12: mod_base = OTHER; note = 2-fluororibose cytosine
  modified_base 13: mod_base = OTHER; note = 2-fluororibose adenine
  modified_base 14: mod_base = OTHER; note = 2-fluororibose guanine
  modified_base 15: mod_base = OTHER; note = 2-fluororibose uracil
  modified_base 16: mod_base = OTHER; note = 2-fluororibose cytosine
  modified_base 17: mod_base = OTHER; note = 2-fluororibose cytosine
  modified_base 18: mod_base = OTHER; note = 2-fluororibose cytosine
  modified_base 19: mod_base = OTHER; note = 2-fluororibose uracil
  modified_base 20: mod_base = um
  modified_base 21: mod_base = OTHER; note = 2-fluororibose uracil
  modified_base 22: mod_base = OTHER; note = 2-fluororibose cytosine
  modified_base 23: mod_base = OTHER; note = 2-fluororibose uracil
  modified_base 24: mod_base = OTHER; note = deoxyribose 6-amino-9-substituted 8,9-dihydro-7H-purin-8-one
  modified_base 25: mod_base = OTHER; note = deoxyribose inosine
  modified_base 26: mod_base = um
  modified_base 27: mod_base = OTHER; note = 2-fluororibose cytosine
  modified_base 28: mod_base = gm
  modified_base 29: mod_base = OTHER; note = 2-O-methylribose adenine
  modified_base 30: mod_base = um
  source 1..30: mol_type = other RNA

SEQ ID NO: 541 - RNA, 30 nt, synthetic construct; identical to SEQ ID NO: 134
  misc_feature 1..30: note = Synthetic: WV-47642
  misc_feature 1..30: note = Synthetic: ADR-0100571
  modified_base 1: mod_base = OTHER; note = biotin linked to 3-(3-aminopropoxy)propane-1,2-diol linked by phosphorothioate to the 5' end of 2-O-methylribose cytosine
  modified_base 1..2: mod_base = OTHER; note = phosphorothioate
  modified_base 2: mod_base = cm
  modified_base 2..3: mod_base = OTHER; note = phosphorothioate
  modified_base 3: mod_base = cm
  modified_base 3..4: mod_base = OTHER; note = phosphorothioate
  modified_base 4: mod_base = OTHER; note = 2-fluororibose adenine
  modified_base 4..5: mod_base = OTHER; note = phosphorothioate
  modified_base 5: mod_base = OTHER; note = 2-fluororibose guanine
  modified_base 5..6: mod_base = OTHER; note = phosphorothioate
  modified_base 6: mod_base = cm
  modified_base 6..7: mod_base = OTHER; note = phosphorothioate
  modified_base 7: mod_base = OTHER; note = 2-fluororibose adenine
  modified_base 7..8: mod_base = OTHER; note = phosphorothioate
  modified_base 8: mod_base = OTHER; note = 2-fluororibose guanine
  modified_base 8..9: mod_base = OTHER; note = phosphorothioate
  modified_base 9: mod_base = OTHER; note = 2-fluororibose cytosine
  modified_base 9..10: mod_base = OTHER; note = phosphorothioate
  modified_base 10: mod_base = OTHER; note = 2-fluororibose uracil
  modified_base 10..11: mod_base = OTHER; note = phosphorothioate
  modified_base 11: mod_base = OTHER; note = 2-fluororibose uracil
  modified_base 11..12: mod_base = OTHER; note = phosphorothioate
  modified_base 12: mod_base = OTHER; note = 2-fluororibose cytosine
  modified_base 12..13: mod_base = OTHER; note = phosphorothioate
  modified_base 13: mod_base = OTHER; note = 2-fluororibose adenine
  modified_base 13..14: mod_base = OTHER; note = phosphorothioate
  modified_base 14: mod_base = OTHER; note = 2-fluororibose guanine
  modified_base 14..15: mod_base = OTHER; note = phosphorothioate
  modified_base 15: mod_base = OTHER; note = 2-fluororibose uracil
  modified_base 15..16: mod_base = OTHER; note = phosphorothioate
  modified_base 16: mod_base = OTHER; note = 2-fluororibose cytosine
  modified_base 16..17: mod_base = OTHER; note = phosphorothioate
  modified_base 17: mod_base = OTHER; note = 2-fluororibose cytosine
  modified_base 17..18: mod_base = OTHER; note = phosphorothioate
  modified_base 18: mod_base = OTHER; note = 2-fluororibose cytosine
  modified_base 18..19: mod_base = OTHER; note = phosphorothioate
  modified_base 19: mod_base = OTHER; note = 2-fluororibose uracil
  modified_base 19..20: mod_base = OTHER; note = phosphorothioate
  modified_base 20: mod_base = um
  modified_base 20..21: mod_base = OTHER; note = phosphorothioate
  modified_base 21: mod_base = OTHER; note = 2-fluororibose uracil
  modified_base 21..22: mod_base = OTHER; note = phosphorothioate
  modified_base 22: mod_base = OTHER; note = 2-fluororibose cytosine
  modified_base 22..23: mod_base = OTHER; note = phosphorothioate
  modified_base 23: mod_base = OTHER; note = 2-fluororibose uracil
  modified_base 23..24: mod_base = OTHER; note = phosphorothioate
  modified_base 24: mod_base = OTHER; note = deoxyribose 6-amino-9-substituted 8,9-dihydro-7H-purin-8-one
  modified_base 24..25: mod_base = OTHER; note = phosphorothioate
  modified_base 25: mod_base = OTHER; note = ribose inosine
  modified_base 25..26: mod_base = OTHER; note = phosphorothioate
  modified_base 26: mod_base = um
  modified_base 26..27: mod_base = OTHER; note = phosphorothioate
  modified_base 27: mod_base = OTHER; note = 2-fluororibose cytosine
  modified_base 27..28: mod_base = OTHER; note = phosphorothioate
  modified_base 28: mod_base = gm
  modified_base 28..29: mod_base = OTHER; note = phosphorothioate
  modified_base 29: mod_base = OTHER; note = 2-O-methylribose adenine
  modified_base 29..30: mod_base = OTHER; note = phosphorothioate
  modified_base 30: mod_base = um
  source 1..30: mol_type = other RNA

SEQ ID NO: 542 - RNA, 30 nt, synthetic construct; identical to SEQ ID NO: 134
  misc_feature 1..30: note = Synthetic: WV-47643
  misc_feature 1..30: note = Synthetic: ADR-0100572
  modified_base 1: mod_base = OTHER; note = biotin linked to 3-(3-aminopropoxy)propane-1,2-diol linked by phosphorothioate to the 5' end of 2-O-methylribose cytosine
  modified_base 1..2: mod_base = OTHER; note R-N-(1,3-dimethylimidazolidin-2-ylidene)phosphoramidate
  modified_base 2: mod_base = cm
  modified_base 2..3: mod_base = OTHER; note = S-phosphorothioate
  modified_base 3: mod_base = cm
  modified_base 3..4: mod_base = OTHER; note = S-phosphorothioate
  modified_base 4: mod_base = OTHER; note = 2-fluororibose adenine
  modified_base 4..5: mod_base = OTHER; note = S-phosphorothioate
  modified_base 5: mod_base = OTHER; note = 2-fluororibose guanine
  modified_base 5..6: mod_base = OTHER; note = S-phosphorothioate
  modified_base 6: mod_base = cm
  modified_base 7: mod_base = OTHER; note = 2-fluororibose adenine
  modified_base 7..8: mod_base = OTHER; note = S-phosphorothioate
  modified_base 8: mod_base = OTHER; note = 2-fluororibose guanine
  modified_base 8..9: mod_base = OTHER; note = S-phosphorothioate
  modified_base 9: mod_base = OTHER; note = 2-fluororibose cytosine
  modified_base 9..10: mod_base = OTHER; note = S-phosphorothioate
  modified_base 10: mod_base = OTHER; note = 2-fluororibose uracil
  modified_base 10..11: mod_base = OTHER; note = S-phosphorothioate
  modified_base 11: mod_base = OTHER; note = 2-fluororibose uracil
  modified_base 11..12: mod_base = OTHER; note R-N-(1,3-dimethylimidazolidin-2-ylidene)phosphoramidate
  modified_base 12: mod_base = OTHER; note = 2-fluororibose cytosine
  modified_base 12..13: mod_base = OTHER; note = S-phosphorothioate
  modified_base 13: mod_base = OTHER; note = 2-fluororibose adenine
  modified_base 14: mod_base = OTHER; note = 2-fluororibose guanine
  modified_base 14..15: mod_base = OTHER; note R-N-(1,3-dimethylimidazolidin-2-ylidene)phosphoramidate
  modified_base 15: mod_base = OTHER; note = 2-fluororibose uracil
  modified_base 15..16: mod_base = OTHER; note = S-phosphorothioate
  modified_base 16: mod_base = OTHER; note = 2-fluororibose cytosine
  modified_base 16..17: mod_base = OTHER; note = S-phosphorothioate
  modified_base 17: mod_base = OTHER; note = 2-fluororibose cytosine
  modified_base 17..18: mod_base = OTHER; note = S-phosphorothioate
  modified_base 18: mod_base = OTHER; note = 2-fluororibose cytosine
  modified_base 18..19: mod_base = OTHER; note = S-phosphorothioate
  modified_base 19: mod_base = OTHER; note = 2-fluororibose uracil
  modified_base 19..20: mod_base = OTHER; note = S-phosphorothioate
  modified_base 20: mod_base = um
  modified_base 21: mod_base = OTHER; note = 2-fluororibose uracil
  modified_base 21..22: mod_base = OTHER; note = S-phosphorothioate
  modified_base 22: mod_base = OTHER; note = 2-fluororibose cytosine
  modified_base 22..23: mod_base = OTHER; note = S-phosphorothioate
  modified_base 23: mod_base = OTHER; note = 2-fluororibose uracil
  modified_base 23..24: mod_base = OTHER; note = S-phosphorothioate
  modified_base 24: mod_base = OTHER; note = deoxyribose 6-amino-9-substituted 8,9-dihydro-7H-purin-8-one
  modified_base 24..25: mod_base = OTHER; note = S-phosphorothioate
  modified_base 25: mod_base = OTHER; note = deoxyribose inosine
  modified_base 25..26: mod_base = OTHER; note S-N-(1,3-dimethylimidazolidin-2-ylidene)phosphoramidate
  modified_base 26: mod_base = um
  modified_base 27: mod_base = OTHER; note = 2-fluororibose cytosine
  modified_base 27..28: mod_base = OTHER; note = S-phosphorothioate
  modified_base 28: mod_base = gm
  modified_base 28..29: mod_base = OTHER; note = S-phosphorothioate
  modified_base 29: mod_base = OTHER; note = 2-O-methylribose adenine
  modified_base 29..30: mod_base = OTHER; note R-N-(1,3-dimethylimidazolidin-2-ylidene)phosphoramidate
  modified_base 30: mod_base = um
  source 1..30: mol_type = other RNA

SEQ ID NO: 543 - RNA, 30 nt, synthetic construct; identical to SEQ ID NO: 273
  misc_feature 1..30: note = Synthetic: WV-47644
  misc_feature 1..30: note = Synthetic: ADR-0100573
  modified_base 1: mod_base = OTHER; note = biotin linked to 3-(3-aminopropoxy)propane-1,2-diol linked by phosphorothioate to the 5' end of 2-O-methylribose cytosine
  modified_base 1..2: mod_base = OTHER; note R-N-(1,3-dimethylimidazolidin-2-ylidene)phosphoramidate
  modified_base 2: mod_base = cm
  modified_base 2..3: mod_base = OTHER; note = S-phosphorothioate
  modified_base 3: mod_base = cm
  modified_base 3..4: mod_base = OTHER; note = S-phosphorothioate
  modified_base 4: mod_base = OTHER; note = 2-fluororibose adenine
  modified_base 4..5: mod_base = OTHER; note = S-phosphorothioate
  modified_base 5: mod_base = OTHER; note = 2-fluororibose guanine
  modified_base 5..6: mod_base = OTHER; note = S-phosphorothioate
  modified_base 6: mod_base = cm
  modified_base 7: mod_base = OTHER; note = 2-O-methylribose adenine
  modified_base 7..8: mod_base = OTHER; note = S-phosphorothioate
  modified_base 8: mod_base = OTHER; note = 2-fluororibose guanine
  modified_base 8..9: mod_base = OTHER; note = S-phosphorothioate
  modified_base 9: mod_base = OTHER; note = 2-fluororibose cytosine
  modified_base 10: mod_base = um
  modified_base 10..11: mod_base = OTHER; note = S-phosphorothioate
  modified_base 11: mod_base = OTHER; note = 2-fluororibose uracil
  modified_base 11..12: mod_base = OTHER; note R-N-(1,3-dimethylimidazolidin-2-ylidene)phosphoramidate
  modified_base 12: mod_base = cm
  modified_base 13: mod_base = OTHER; note = 2-fluororibose adenine
  modified_base 13..14: mod_base = OTHER; note = S-phosphorothioate
  modified_base 14: mod_base = OTHER; note = 2-fluororibose guanine
  modified_base 14..15: mod_base = OTHER; note R-N-(1,3-dimethylimidazolidin-2-ylidene)phosphoramidate
  modified_base 15: mod_base = OTHER; note = 2-fluororibose uracil
  modified_base 16: mod_base = cm
  modified_base 16..17: mod_base = OTHER; note = S-phosphorothioate
  modified_base 17: mod_base = OTHER; note = 2-fluororibose cytosine
  modified_base 17..18: mod_base = OTHER; note = S-phosphorothioate
  modified_base 18: mod_base = OTHER; note = 2-fluororibose cytosine
  modified_base 18..19: mod_base = OTHER; note = S-phosphorothioate
  modified_base 19: mod_base = OTHER; note = 2-fluororibose uracil
  modified_base 19..20: mod_base = OTHER; note = S-phosphorothioate
  modified_base 20: mod_base = um
  modified_base 21: mod_base = um
  modified_base 22: mod_base = OTHER; note = 2-fluororibose cytosine
  modified_base 22..23: mod_base = OTHER; note = S-phosphorothioate
  modified_base 23: mod_base = OTHER; note = deoxyribose thymine
  modified_base 23..24: mod_base = OTHER; note = S-phosphorothioate
  modified_base 24: mod_base = OTHER; note = deoxyribose uracil (position 3 connectivity)
  modified_base 24..25: mod_base = OTHER; note = S-phosphorothioate
  modified_base 25: mod_base = OTHER; note = deoxyribose inosine
  modified_base 25..26: mod_base = OTHER; note S-N-(1,3-dimethylimidazolidin-2-ylidene)phosphoramidate
  modified_base 26: mod_base = um
  modified_base 27: mod_base = OTHER; note = 2-fluororibose cytosine
  modified_base 27..28: mod_base = OTHER; note = S-phosphorothioate
  modified_base 28: mod_base = gm
  modified_base 28..29: mod_base = OTHER; note = S-phosphorothioate
  modified_base 29: mod_base = OTHER; note = 2-O-methylribose adenine
  modified_base 29..30: mod_base = OTHER; note R-N-(1,3-dimethylimidazolidin-2-ylidene)phosphoramidate
  modified_base 30: mod_base = um
  source 1..30: mol_type = other RNA

SEQ ID NO: 544 - RNA, 30 nt, synthetic construct; identical to SEQ ID NO: 273
  misc_feature 1..30: note = Synthetic: WV-47645
  misc_feature 1..30: note = Synthetic: ADR-0100574
  modified_base 1: mod_base = OTHER; note = biotin linked to 3-(3-aminopropoxy)propane-1,2-diol linked by phosphorothioate to the 5' end of 2-O-methylribose cytosine
  modified_base 1..2: mod_base = OTHER; note R-N-(1,3-dimethylimidazolidin-2-ylidene)phosphoramidate
  modified_base 2: mod_base = cm
  modified_base 2..3: mod_base = OTHER; note = S-phosphorothioate
  modified_base 3: mod_base = cm
  modified_base 3..4: mod_base = OTHER; note = S-phosphorothioate
  modified_base 4: mod_base = OTHER; note = 2-fluororibose adenine
  modified_base 4..5: mod_base = OTHER; note = S-phosphorothioate
  modified_base 5: mod_base = OTHER; note = 2-fluororibose guanine
  modified_base 5..6: mod_base = OTHER; note = S-phosphorothioate
  modified_base 6: mod_base = cm
  modified_base 7: mod_base = OTHER; note = 2-O-methylribose adenine
  modified_base 8: mod_base = OTHER; note = 2-fluororibose guanine
  modified_base 8..9: mod_base = OTHER; note = S-phosphorothioate
  modified_base 9: mod_base = OTHER; note = 2-fluororibose cytosine
  modified_base 9..10: mod_base = OTHER; note = S-phosphorothioate
  modified_base 10: mod_base = um
  modified_base 11: mod_base = OTHER; note = 2-fluororibose uracil
  modified_base 11..12: mod_base = OTHER; note R-N-(1,3-dimethylimidazolidin-2-ylidene)phosphoramidate
  modified_base 12: mod_base = cm
  modified_base 13: mod_base = OTHER; note = 2-fluororibose adenine
  modified_base 13..14: mod_base = OTHER; note = S-phosphorothioate
  modified_base 14: mod_base = OTHER; note = 2-fluororibose guanine
  modified_base 14..15: mod_base = OTHER; note R-N-(1,3-dimethylimidazolidin-2-ylidene)phosphoramidate
  modified_base 15: mod_base = OTHER; note = 2-fluororibose uracil
  modified_base 16: mod_base = cm
  modified_base 16..17: mod_base = OTHER; note = S-phosphorothioate
  modified_base 17: mod_base = OTHER; note = 2-fluororibose cytosine
  modified_base 17..18: mod_base = OTHER; note = S-phosphorothioate
  modified_base 18: mod_base = OTHER; note = 2-fluororibose cytosine
  modified_base 18..19: mod_base = OTHER; note = S-phosphorothioate
  modified_base 19: mod_base = OTHER; note = 2-fluororibose uracil
  modified_base 19..20: mod_base = OTHER; note R-N-(1,3-dimethylimidazolidin-2-ylidene)phosphoramidate
  modified_base 20: mod_base = um
  modified_base 21: mod_base = um
  modified_base 22: mod_base = OTHER; note = 2-fluororibose cytosine
  modified_base 22..23: mod_base = OTHER; note = S-phosphorothioate
  modified_base 23: mod_base = OTHER; note = deoxyribose thymine
  modified_base 23..24: mod_base = OTHER; note = S-phosphorothioate
  modified_base 24: mod_base = OTHER; note = deoxyribose uracil (position 3 connectivity)
  modified_base 24..25: mod_base = OTHER; note = S-phosphorothioate
  modified_base 25: mod_base = OTHER; note = deoxyribose inosine
  modified_base 25..26: mod_base = OTHER; note S-N-(1,3-dimethylimidazolidin-2-ylidene)phosphoramidate
  modified_base 26: mod_base = um
  modified_base 27: mod_base = OTHER; note = 2-fluororibose cytosine
  modified_base 27..28: mod_base = OTHER; note = S-phosphorothioate
  modified_base 28: mod_base = gm
  modified_base 28..29: mod_base = OTHER; note = S-phosphorothioate
  modified_base 29: mod_base = OTHER; note = 2-O-methylribose adenine
  modified_base 29..30: mod_base = OTHER; note R-N-(1,3-dimethylimidazolidin-2-ylidene)phosphoramidate
  modified_base 30: mod_base = um
  source 1..30: mol_type = other RNA

SEQ ID NO: 545 - RNA, 30 nt, synthetic construct; identical to SEQ ID NO: 273
  misc_feature 1..30: note = Synthetic: WV-47646
  misc_feature 1..30: note = Synthetic: ADR-0100575
  modified_base 1: mod_base = OTHER; note = biotin linked to 3-(3-aminopropoxy)propane-1,2-diol linked by phosphorothioate to the 5' end of 2-O-methylribose cytosine
  modified_base 1..2: mod_base = OTHER; note R-N-(1,3-dimethylimidazolidin-2-ylidene)phosphoramidate
  modified_base 2: mod_base = cm
  modified_base 2..3: mod_base = OTHER; note = S-phosphorothioate
  modified_base 3: mod_base = cm
  modified_base 3..4: mod_base = OTHER; note = S-phosphorothioate
  modified_base 4: mod_base = OTHER; note = 2-fluororibose adenine
  modified_base 4..5: mod_base = OTHER; note = S-phosphorothioate
  modified_base 5: mod_base = OTHER; note = 2-fluororibose guanine
  modified_base 5..6: mod_base = OTHER; note = S-phosphorothioate
  modified_base 6: mod_base = cm
  modified_base 7: mod_base = OTHER; note = 2-O-methylribose adenine
  modified_base 7..8: mod_base = OTHER; note = S-phosphorothioate
  modified_base 8: mod_base = OTHER; note = 2-fluororibose guanine
  modified_base 8..9: mod_base = OTHER; note = S-phosphorothioate
  modified_base 9: mod_base = OTHER; note = 2-fluororibose cytosine
  modified_base 10: mod_base = um
  modified_base 10..11: mod_base = OTHER; note = S-phosphorothioate
  modified_base 11: mod_base = OTHER; note = 2-fluororibose uracil
  modified_base 11..12: mod_base = OTHER; note R-N-(1,3-dimethylimidazolidin-2-ylidene)phosphoramidate
  modified_base 12: mod_base = cm
  modified_base 13: mod_base = OTHER; note = 2-fluororibose adenine
  modified_base 13..14: mod_base = OTHER; note = S-phosphorothioate
  modified_base 14: mod_base = OTHER; note = 2-fluororibose guanine
  modified_base 14..15: mod_base = OTHER; note R-N-(1,3-dimethylimidazolidin-2-ylidene)phosphoramidate
  modified_base 15: mod_base = OTHER; note = 2-fluororibose uracil
  modified_base 16: mod_base = cm
  modified_base 17: mod_base = cm
  modified_base 17..18: mod_base = OTHER; note = S-phosphorothioate
  modified_base 18: mod_base = OTHER; note = 2-fluororibose cytosine
  modified_base 18..19: mod_base = OTHER; note = S-phosphorothioate
  modified_base 19: mod_base = OTHER; note = 2-fluororibose uracil
  modified_base 19..20: mod_base = OTHER; note = S-phosphorothioate
  modified_base 20: mod_base = um
  modified_base 21: mod_base = um
  modified_base 22: mod_base = OTHER; note = 2-fluororibose cytosine
  modified_base 22..23: mod_base = OTHER; note = S-phosphorothioate
  modified_base 23: mod_base = OTHER; note = deoxyribose thymine
  modified_base 23..24: mod_base = OTHER; note = S-phosphorothioate
  modified_base 24: mod_base = OTHER; note = deoxyribose uracil (position 3 connectivity)
  modified_base 24..25: mod_base = OTHER; note = S-phosphorothioate
  modified_base 25: mod_base = OTHER; note = deoxyribose inosine
  modified_base 25..26: mod_base = OTHER; note S-N-(1,3-dimethylimidazolidin-2-ylidene)phosphoramidate
  modified_base 26: mod_base = um
  modified_base 27: mod_base = OTHER; note = 2-fluororibose cytosine
  modified_base 27..28: mod_base = OTHER; note = S-phosphorothioate
  modified_base 28: mod_base = gm
  modified_base 28..29: mod_base = OTHER; note = S-phosphorothioate
  modified_base 29: mod_base = OTHER; note = 2-O-methylribose adenine
  modified_base 29..30: mod_base = OTHER; note R-N-(1,3-dimethylimidazolidin-2-ylidene)phosphoramidate
  modified_base 30: mod_base = um
  source 1..30: mol_type = other RNA

SEQ ID NO: 546 - RNA, 30 nt, synthetic construct; identical to SEQ ID NO: 273
  misc_feature 1..30: note = Synthetic: WV-47647
  misc_feature 1..30: note = Synthetic: ADR-0100576
  modified_base 1: mod_base = OTHER; note = biotin linked to 3-(3-aminopropoxy)propane-1,2-diol linked by phosphorothioate to the 5' end of 2-O-methylribose cytosine
  modified_base 1..2: mod_base = OTHER; note R-N-(1,3-dimethylimidazolidin-2-ylidene)phosphoramidate
  modified_base 2: mod_base = cm
  modified_base 2..3: mod_base = OTHER; note = S-phosphorothioate
  modified_base 3: mod_base = cm
  modified_base 3..4: mod_base = OTHER; note = S-phosphorothioate
  modified_base 4: mod_base = OTHER; note = 2-fluororibose adenine
  modified_base 4..5: mod_base = OTHER; note = S-phosphorothioate
  modified_base 5: mod_base = OTHER; note = 2-fluororibose guanine
  modified_base 5..6: mod_base = OTHER; note = S-phosphorothioate
  modified_base 6: mod_base = cm
  modified_base 7: mod_base = OTHER; note = 2-O-methylribose adenine
  modified_base 8: mod_base = OTHER; note = 2-fluororibose guanine
  modified_base 8..9: mod_base = OTHER; note = S-phosphorothioate
  modified_base 9: mod_base = cm
  modified_base 10: mod_base = um
  modified_base 10..11: mod_base = OTHER; note = S-phosphorothioate
  modified_base 11: mod_base = um
  modified_base 11..12: mod_base = OTHER; note R-N-(1,3-dimethylimidazolidin-2-ylidene)phosphoramidate
  modified_base 12: mod_base = cm
  modified_base 13: mod_base = OTHER; note = 2-fluororibose adenine
  modified_base 13..14: mod_base = OTHER; note = S-phosphorothioate
  modified_base 14: mod_base = OTHER; note = 2-fluororibose guanine
  modified_base 14..15: mod_base = OTHER; note R-N-(1,3-dimethylimidazolidin-2-ylidene)phosphoramidate
  modified_base 15: mod_base = um
  modified_base 16: mod_base = cm
  modified_base 17: mod_base = cm
  modified_base 17..18: mod_base = OTHER; note = S-phosphorothioate
  modified_base 18: mod_base = OTHER; note = 2-fluororibose cytosine
  modified_base 18..19: mod_base = OTHER; note = S-phosphorothioate
  modified_base 19: mod_base = OTHER; note = 2-fluororibose uracil
  modified_base 19..20: mod_base = OTHER; note = S-phosphorothioate
  modified_base 20: mod_base = um
  modified_base 21: mod_base = um
  modified_base 22: mod_base = OTHER; note = 2-fluororibose cytosine
  modified_base 22..23: mod_base = OTHER; note = S-phosphorothioate
  modified_base 23: mod_base = OTHER; note = deoxyribose thymine
  modified_base 23..24: mod_base = OTHER; note = S-phosphorothioate
  modified_base 24: mod_base = OTHER; note = deoxyribose uracil (position 3 connectivity)
  modified_base 24..25: mod_base = OTHER; note = S-phosphorothioate
  modified_base 25: mod_base = OTHER; note = deoxyribose inosine
  modified_base 25..26: mod_base = OTHER; note S-N-(1,3-dimethylimidazolidin-2-ylidene)phosphoramidate
  modified_base 26: mod_base = um
  modified_base 27: mod_base = OTHER; note = 2-fluororibose cytosine
  modified_base 27..28: mod_base = OTHER; note = S-phosphorothioate
  modified_base 28: mod_base = gm
  modified_base 28..29: mod_base = OTHER; note = S-phosphorothioate
  modified_base 29: mod_base = OTHER; note = 2-O-methylribose adenine
  modified_base 29..30: mod_base = OTHER; note R-N-(1,3-dimethylimidazolidin-2-ylidene)phosphoramidate
  modified_base 30: mod_base = um
  source 1..30: mol_type = other RNA

SEQ ID NO: 547 - RNA, 30 nt, synthetic construct; identical to SEQ ID NO: 273
  misc_feature 1..30: note = Synthetic: WV-47648
  misc_feature 1..30: note = Synthetic: ADR-0100577
  modified_base 1: mod_base = OTHER; note = biotin linked to 3-(3-aminopropoxy)propane-1,2-diol linked by phosphorothioate to the 5' end of 2-O-methylribose cytosine
  modified_base 1..2: mod_base = OTHER; note R-N-(1,3-dimethylimidazolidin-2-ylidene)phosphoramidate
  modified_base 2: mod_base = cm
  modified_base 2..3: mod_base = OTHER; note = S-phosphorothioate
  modified_base 3: mod_base = cm
  modified_base 3..4: mod_base = OTHER; note = S-phosphorothioate
  modified_base 4: mod_base = OTHER; note = 2-fluororibose adenine
  modified_base 4..5: mod_base = OTHER; note = S-phosphorothioate
  modified_base 5: mod_base = OTHER; note = 2-fluororibose guanine
  modified_base 5..6: mod_base = OTHER; note = S-phosphorothioate
  modified_base 6: mod_base = OTHER; note = 2-O-methoxyethylribose 5-methyl-cytidine
  modified_base 7: mod_base = OTHER; note = 2-O-methylribose adenine
  modified_base 7..8: mod_base = OTHER; note = S-phosphorothioate
  modified_base 8: mod_base = OTHER; note = 2-fluororibose guanine
  modified_base 8..9: mod_base = OTHER; note = S-phosphorothioate
  modified_base 9: mod_base = OTHER; note = 2-fluororibose cytosine
  modified_base 10: mod_base = OTHER; note = 2-O-methoxyethylribose thymine
  modified_base 10..11: mod_base = OTHER; note = S-phosphorothioate
  modified_base 11: mod_base = OTHER; note = 2-fluororibose uracil
  modified_base 11..12: mod_base = OTHER; note R-N-(1,3-dimethylimidazolidin-2-ylidene)phosphoramidate
  modified_base 12: mod_base = cm
  modified_base 13: mod_base = OTHER; note = 2-fluororibose adenine
  modified_base 13..14: mod_base = OTHER; note = S-phosphorothioate
  modified_base 14: mod_base = OTHER; note = 2-fluororibose guanine
  modified_base 14..15: mod_base = OTHER; note R-N-(1,3-dimethylimidazolidin-2-ylidene)phosphoramidate
  modified_base 15: mod_base = OTHER; note = 2-fluororibose uracil
  modified_base 16: mod_base = cm
  modified_base 16..17: mod_base = OTHER; note = S-phosphorothioate
  modified_base 17: mod_base = OTHER; note = 2-fluororibose cytosine
  modified_base 17..18: mod_base = OTHER; note = S-phosphorothioate
  modified_base 18: mod_base = OTHER; note = 2-fluororibose cytosine
  modified_base 18..19: mod_base = OTHER; note = S-phosphorothioate
  modified_base 19: mod_base = OTHER; note = 2-fluororibose uracil
  modified_base 19..20: mod_base = OTHER; note = S-phosphorothioate
  modified_base 20: mod_base = um
  modified_base 21: mod_base = OTHER; note = 2-O-methoxyethylribose thymine
  modified_base 22: mod_base = OTHER; note = 2-fluororibose cytosine
  modified_base 22..23: mod_base = OTHER; note = S-phosphorothioate
  modified_base 23: mod_base = OTHER; note = deoxyribose thymine
  modified_base 23..24: mod_base = OTHER; note = S-phosphorothioate
  modified_base 24: mod_base = OTHER; note = deoxyribose uracil (position 3 connectivity)
  modified_base 24..25: mod_base = OTHER; note = S-phosphorothioate
  modified_base 25: mod_base = OTHER; note = deoxyribose inosine
  modified_base 25..26: mod_base = OTHER; note S-N-(1,3-dimethylimidazolidin-2-ylidene)phosphoramidate
  modified_base 26: mod_base = um
  modified_base 27: mod_base = OTHER; note = 2-fluororibose cytosine
  modified_base 27..28: mod_base = OTHER; note = S-phosphorothioate
  modified_base 28: mod_base = gm
  modified_base 28..29: mod_base = OTHER; note = S-phosphorothioate
  modified_base 29: mod_base = OTHER; note = 2-O-methylribose adenine
  modified_base 29..30: mod_base = OTHER; note R-N-(1,3-dimethylimidazolidin-2-ylidene)phosphoramidate
  modified_base 30: mod_base = um
  source 1..30: mol_type = other RNA

SEQ ID NO: 548 - RNA, 30 nt, synthetic construct; identical to SEQ ID NO: 273
  misc_feature 1..30: note = Synthetic: WV-48453
  misc_feature 1..30: note = Synthetic: ADR-0100583
  modified_base 1: mod_base = OTHER; note = triantennary GalNAc with C12 linker linked to 6-aminohexanol linked by phosphate to the 5' end of 2-O-methylribose cytosine
  modified_base 1..2: mod_base = OTHER; note R-N-(1,3-dimethylimidazolidin-2-ylidene)phosphoramidate
  modified_base 2: mod_base = cm
  modified_base 2..3: mod_base = OTHER; note = S-phosphorothioate
  modified_base 3: mod_base = cm
  modified_base 3..4: mod_base = OTHER; note = S-phosphorothioate
  modified_base 4: mod_base = OTHER; note = 2-fluororibose adenine
  modified_base 4..5: mod_base = OTHER; note = S-phosphorothioate
  modified_base 5: mod_base = OTHER; note = 2-fluororibose guanine
  modified_base 5..6: mod_base = OTHER; note = S-phosphorothioate
  modified_base 6: mod_base = OTHER; note = 2-O-methoxyethylribose 5-methyl-cytidine
  modified_base 7: mod_base = OTHER; note = 2-O-methylribose adenine
  modified_base 7..8: mod_base = OTHER; note = S-phosphorothioate
  modified_base 8: mod_base = OTHER; note = 2-fluororibose guanine
  modified_base 8..9: mod_base = OTHER; note = S-phosphorothioate
  modified_base 9: mod_base = OTHER; note = 2-fluororibose cytosine
  modified_base 10: mod_base = um
  modified_base 10..11: mod_base = OTHER; note = S-phosphorothioate
  modified_base 11: mod_base = OTHER; note = 2-fluororibose uracil
  modified_base 11..12: mod_base = OTHER; note R-N-(1,3-dimethylimidazolidin-2-ylidene)phosphoramidate
  modified_base 12: mod_base = cm
  modified_base 13: mod_base = OTHER; note = 2-fluororibose adenine
  modified_base 13..14: mod_base = OTHER; note = S-phosphorothioate
  modified_base 14: mod_base = OTHER; note = 2-fluororibose guanine
  modified_base 14..15: mod_base = OTHER; note R-N-(1,3-dimethylimidazolidin-2-ylidene)phosphoramidate
  modified_base 15: mod_base = OTHER; note = 2-fluororibose uracil
  modified_base 16: mod_base = OTHER; note = 2-O-methoxyethylribose 5-methyl-cytidine
  modified_base 17: mod_base = cm
  modified_base 17..18: mod_base = OTHER; note = S-phosphorothioate
  modified_base 18: mod_base = OTHER; note = 2-fluororibose cytosine
  modified_base 18..19: mod_base = OTHER; note = S-phosphorothioate
  modified_base 19: mod_base = OTHER; note = 2-fluororibose uracil
  modified_base 19..20: mod_base = OTHER; note = S-phosphorothioate
  modified_base 20: mod_base = um
  modified_base 21: mod_base = OTHER; note = 2-O-methoxyethylribose thymine
  modified_base 22: mod_base = OTHER; note = 2-fluororibose cytosine
  modified_base 22..23: mod_base = OTHER; note = S-phosphorothioate
  modified_base 23: mod_base = OTHER; note = deoxyribose thymine
  modified_base 23..24: mod_base = OTHER; note = S-phosphorothioate
  modified_base 24: mod_base = OTHER; note = deoxyribose uracil (position 3 connectivity)
  modified_base 24..25: mod_base = OTHER; note = S-phosphorothioate
  modified_base 25: mod_base = OTHER; note = deoxyribose inosine
  modified_base 25..26: mod_base = OTHER; note S-N-(1,3-dimethylimidazolidin-2-ylidene)phosphoramidate
  modified_base 26: mod_base = um
  modified_base 27: mod_base = OTHER; note = 2-fluororibose cytosine
  modified_base 27..28: mod_base = OTHER; note = S-phosphorothioate
  modified_base 28: mod_base = gm
  modified_base 28..29: mod_base = OTHER; note = S-phosphorothioate
  modified_base 29: mod_base = OTHER; note = 2-O-methylribose adenine
  modified_base 29..30: mod_base = OTHER; note R-N-(1,3-dimethylimidazolidin-2-ylidene)phosphoramidate
  modified_base 30: mod_base = um
  source 1..30: mol_type = other RNA

SEQ ID NO: 549 - RNA, 30 nt, synthetic construct; identical to SEQ ID NO: 273
  misc_feature 1..30: note = Synthetic: WV-48454
  misc_feature 1..30: note = Synthetic: ADR-0100584
  modified_base 1: mod_base = OTHER; note = triantennary GalNAc with C12 linker linked to 6-aminohexanol linked by phosphate to the 5' end of 2-O-methylribose cytosine
  modified_base 1..2: mod_base = OTHER; note R-N-(1,3-dimethylimidazolidin-2-ylidene)phosphoramidate
  modified_base 2: mod_base = cm
  modified_base 2..3: mod_base = OTHER; note = S-phosphorothioate
  modified_base 3: mod_base = cm
  modified_base 3..4: mod_base = OTHER; note = S-phosphorothioate
  modified_base 4: mod_base = OTHER; note = 2-fluororibose adenine
  modified_base 4..5: mod_base = OTHER; note = S-phosphorothioate
  modified_base 5: mod_base = OTHER; note = 2-fluororibose guanine
  modified_base 5..6: mod_base = OTHER; note = S-phosphorothioate
  modified_base 6: mod_base = OTHER; note = 2-O-methoxyethylribose 5-methyl-cytidine
  modified_base 7: mod_base = OTHER; note = 2-O-methylribose adenine
  modified_base 7..8: mod_base = OTHER; note = S-phosphorothioate
  modified_base 8: mod_base = OTHER; note = 2-fluororibose guanine
  modified_base 8..9: mod_base = OTHER; note = S-phosphorothioate
  modified_base 9: mod_base = OTHER; note = 2-fluororibose cytosine
  modified_base 10: mod_base = um
  modified_base 10..11: mod_base = OTHER; note = S-phosphorothioate
  modified_base 11: mod_base = OTHER; note = 2-fluororibose uracil
  modified_base 11..12: mod_base = OTHER; note R-N-(1,3-dimethylimidazolidin-2-ylidene)phosphoramidate
  modified_base 12: mod_base = cm
  modified_base 13: mod_base = OTHER; note = 2-fluororibose adenine
  modified_base 13..14: mod_base = OTHER; note = S-phosphorothioate
  modified_base 14: mod_base = gm
  modified_base 14..15: mod_base = OTHER; note R-N-(1,3-dimethylimidazolidin-2-ylidene)phosphoramidate
  modified_base 15: mod_base = OTHER; note = 2-fluororibose uracil
  modified_base 16: mod_base = OTHER; note = 2-O-methoxyethylribose 5-methyl-cytidine
  modified_base 17: mod_base = cm
  modified_base 17..18: mod_base = OTHER; note = S-phosphorothioate
  modified_base 18: mod_base = OTHER; note = 2-fluororibose cytosine
  modified_base 18..19: mod_base = OTHER; note = S-phosphorothioate
  modified_base 19: mod_base = OTHER; note = 2-fluororibose uracil
  modified_base 19..20: mod_base = OTHER; note = S-phosphorothioate
  modified_base 20: mod_base = um
  modified_base 21: mod_base = OTHER; note = 2-O-methoxyethylribose thymine
  modified_base 22: mod_base = OTHER; note = 2-fluororibose cytosine
  modified_base 22..23: mod_base = OTHER; note = S-phosphorothioate
  modified_base 23: mod_base = OTHER; note = deoxyribose thymine
  modified_base 23..24: mod_base = OTHER; note = S-phosphorothioate
  modified_base 24: mod_base = OTHER; note = deoxyribose uracil (position 3 connectivity)
  modified_base 24..25: mod_base = OTHER; note = S-phosphorothioate
  modified_base 25: mod_base = OTHER; note = deoxyribose inosine
  modified_base 25..26: mod_base = OTHER; note S-N-(1,3-dimethylimidazolidin-2-ylidene)phosphoramidate
  modified_base 26: mod_base = um
  modified_base 27: mod_base = OTHER; note = 2-fluororibose cytosine
  modified_base 27..28: mod_base = OTHER; note = S-phosphorothioate
  modified_base 28: mod_base = gm
  modified_base 28..29: mod_base = OTHER; note = S-phosphorothioate
  modified_base 29: mod_base = OTHER; note = 2-O-methylribose adenine
  modified_base 29..30: mod_base = OTHER; note R-N-(1,3-dimethylimidazolidin-2-ylidene)phosphoramidate
  modified_base 30: mod_base = um
  source 1..30: mol_type = other RNA

SEQ ID NO: 550 - RNA, 30 nt, synthetic construct; identical to SEQ ID NO: 273
  misc_feature 1..30: note = Synthetic: WV-48455
  misc_feature 1..30: note = Synthetic: ADR-0104186
  modified_base 1: mod_base = cm
  modified_base 1..2: mod_base = OTHER; note R-N-(1,3-dimethylimidazolidin-2-ylidene)phosphoramidate
  modified_base 2: mod_base = cm
  modified_base 2..3: mod_base = OTHER; note = S-phosphorothioate
  modified_base 3: mod_base = cm
  modified_base 3..4: mod_base = OTHER; note = S-phosphorothioate
  modified_base 4: mod_base = OTHER; note = 2-fluororibose adenine
  modified_base 4..5: mod_base = OTHER; note = S-phosphorothioate
  modified_base 5: mod_base = OTHER; note = 2-fluororibose guanine
  modified_base 5..6: mod_base = OTHER; note = S-phosphorothioate
  modified_base 6: mod_base = cm
  modified_base 7: mod_base = OTHER; note = 2-O-methylribose adenine
  modified_base 7..8: mod_base = OTHER; note = S-phosphorothioate
  modified_base 8: mod_base = OTHER; note = 2-fluororibose guanine
  modified_base 8..9: mod_base = OTHER; note = S-phosphorothioate
  modified_base 9: mod_base = OTHER; note = 2-fluororibose cytosine
  modified_base 10: mod_base = um
  modified_base 10..11: mod_base = OTHER; note = S-phosphorothioate
  modified_base 11: mod_base = OTHER; note = 2-fluororibose uracil
  modified_base 11..12: mod_base = OTHER; note R-N-(1,3-dimethylimidazolidin-2-ylidene)phosphoramidate
  modified_base 12: mod_base = cm
  modified_base 13: mod_base = OTHER; note = 2-fluororibose adenine
  modified_base 13..14: mod_base = OTHER; note = S-phosphorothioate
  modified_base 14: mod_base = OTHER; note = 2-fluororibose guanine
  modified_base 14..15: mod_base = OTHER; note R-N-(1,3-dimethylimidazolidin-2-ylidene)phosphoramidate
  modified_base 15: mod_base = OTHER; note = 2-fluororibose uracil
  modified_base 16: mod_base = cm
  modified_base 16..17: mod_base = OTHER; note = S-phosphorothioate
  modified_base 17: mod_base = OTHER; note = 2-fluororibose cytosine
  modified_base 17..18: mod_base = OTHER; note = S-phosphorothioate
  modified_base 18: mod_base = OTHER; note = 2-fluororibose cytosine
  modified_base 18..19: mod_base = OTHER; note = S-phosphorothioate
  modified_base 19: mod_base = OTHER; note = 2-fluororibose uracil
  modified_base 19..20: mod_base = OTHER; note = S-phosphorothioate
  modified_base 20: mod_base = um
  modified_base 21: mod_base = um
  modified_base 22: mod_base = OTHER; note = 2-fluororibose cytosine
  modified_base 22..23: mod_base = OTHER; note = S-phosphorothioate
  modified_base 23: mod_base = OTHER; note = deoxyribose thymine
  modified_base 23..24: mod_base = OTHER; note = S-phosphorothioate
  modified_base 24: mod_base = OTHER; note = deoxyribose uracil (position 3 connectivity)
  modified_base 24..25: mod_base = OTHER; note = S-phosphorothioate
  modified_base 25: mod_base = OTHER; note = deoxyribose inosine
  modified_base 25..26: mod_base = OTHER; note = S-N-(bis(dimethylamino)methylene)phosphoramidate
  modified_base 26: mod_base = um
  modified_base 27: mod_base = OTHER; note = 2-fluororibose cytosine
  modified_base 27..28: mod_base = OTHER; note = S-phosphorothioate
  modified_base 28: mod_base = gm
  modified_base 28..29: mod_base = OTHER; note = S-phosphorothioate
  modified_base 29: mod_base = OTHER; note = 2-O-methylribose adenine
  modified_base 29..30: mod_base = OTHER; note R-N-(1,3-dimethylimidazolidin-2-ylidene)phosphoramidate
  modified_base 30: mod_base = um
  source 1..30: mol_type = other RNA

SEQ ID NO: 551 - RNA, 30 nt, synthetic construct; identical to SEQ ID NO: 273
  misc_feature 1..30: note = Synthetic: WV-48456
  misc_feature 1..30: note = Synthetic: ADR-0104187
  modified_base 1: mod_base = cm
  modified_base 1..2: mod_base = OTHER; note R-N-(1,3-dimethylimidazolidin-2-ylidene)phosphoramidate
  modified_base 2: mod_base = cm
  modified_base 2..3: mod_base = OTHER; note = S-phosphorothioate
  modified_base 3: mod_base = cm
  modified_base 3..4: mod_base = OTHER; note = S-phosphorothioate
  modified_base 4: mod_base = OTHER; note = 2-fluororibose adenine
  modified_base 4..5: mod_base = OTHER; note = S-phosphorothioate
  modified_base 5: mod_base = OTHER; note = 2-fluororibose guanine
  modified_base 5..6: mod_base = OTHER; note = S-phosphorothioate
  modified_base 6: mod_base = cm
  modified_base 7: mod_base = OTHER; note = 2-O-methylribose adenine
  modified_base 7..8: mod_base = OTHER; note = S-phosphorothioate
  modified_base 8: mod_base = OTHER; note = 2-fluororibose guanine
  modified_base 8..9: mod_base = OTHER; note = S-phosphorothioate
  modified_base 9: mod_base = OTHER; note = 2-fluororibose cytosine
  modified_base 10: mod_base = um
  modified_base 10..11: mod_base = OTHER; note = S-phosphorothioate
  modified_base 11: mod_base = OTHER; note = 2-fluororibose uracil
  modified_base 11..12: mod_base = OTHER; note R-N-(1,3-dimethylimidazolidin-2-ylidene)phosphoramidate
  modified_base 12: mod_base = cm
  modified_base 13: mod_base = OTHER; note = 2-fluororibose adenine
  modified_base 13..14: mod_base = OTHER; note = S-phosphorothioate
  modified_base 14: mod_base = OTHER; note = 2-fluororibose guanine
  modified_base 14..15: mod_base = OTHER; note R-N-(1,3-dimethylimidazolidin-2-ylidene)phosphoramidate
  modified_base 15: mod_base = OTHER; note = 2-fluororibose uracil
  modified_base 16: mod_base = cm
  modified_base 16..17: mod_base = OTHER; note = S-phosphorothioate
  modified_base 17: mod_base = OTHER; note = 2-fluororibose cytosine
  modified_base 17..18: mod_base = OTHER; note = S-phosphorothioate
  modified_base 18: mod_base = OTHER; note = 2-fluororibose cytosine
  modified_base 18..19: mod_base = OTHER; note = S-phosphorothioate
  modified_base 19: mod_base = OTHER; note = 2-fluororibose uracil
  modified_base 19..20: mod_base = OTHER; note = S-phosphorothioate
  modified_base 20: mod_base = um
  modified_base 21: mod_base = um
  modified_base 22: mod_base = OTHER; note = 2-fluororibose cytosine
  modified_base 22..23: mod_base = OTHER; note = S-phosphorothioate
  modified_base 23: mod_base = OTHER; note = deoxyribose thymine
  modified_base 23..24: mod_base = OTHER; note = S-phosphorothioate
  modified_base 24: mod_base = OTHER; note = deoxyribose uracil (position 3 connectivity)
  modified_base 24..25: mod_base = OTHER; note = S-phosphorothioate
  modified_base 25: mod_base = OTHER; note = deoxyribose inosine
  modified_base 25..26: mod_base = OTHER; note = S-N-(di(pyrrolidin-1-yl)methylene)phosphoramidate
  modified_base 26: mod_base = um
  modified_base 27: mod_base = OTHER; note = 2-fluororibose cytosine
  modified_base 27..28: mod_base = OTHER; note = S-phosphorothioate
  modified_base 28: mod_base = gm
  modified_base 28..29: mod_base = OTHER; note = S-phosphorothioate
  modified_base 29: mod_base = OTHER; note = 2-O-methylribose adenine
  modified_base 29..30: mod_base = OTHER; note R-N-(1,3-dimethylimidazolidin-2-ylidene)phosphoramidate
  modified_base 30: mod_base = um
  source 1..30: mol_type = other RNA

SEQ ID NO: 552 - RNA, 30 nt, synthetic construct; identical to SEQ ID NO: 273
  misc_feature 1..30: note = Synthetic: WV-48457
  misc_feature 1..30: note = Synthetic: ADR-0104189
  modified_base 1: mod_base = cm
  modified_base 1..2: mod_base = OTHER; note R-N-(1,3-dimethylimidazolidin-2-ylidene)phosphoramidate
  modified_base 2: mod_base = cm
  modified_base 2..3: mod_base = OTHER; note = S-phosphorothioate
  modified_base 3: mod_base = cm
  modified_base 3..4: mod_base = OTHER; note = S-phosphorothioate
  modified_base 4: mod_base = OTHER; note = 2-fluororibose adenine
  modified_base 4..5: mod_base = OTHER; note = S-phosphorothioate
  modified_base 5: mod_base = OTHER; note = 2-fluororibose guanine
  modified_base 5..6: mod_base = OTHER; note = S-phosphorothioate
  modified_base 6: mod_base = cm
  modified_base 7: mod_base = OTHER; note = 2-O-methylribose adenine
  modified_base 7..8: mod_base = OTHER; note = S-phosphorothioate
  modified_base 8: mod_base = OTHER; note = 2-fluororibose guanine
  modified_base 8..9: mod_base = OTHER; note = S-phosphorothioate
  modified_base 9: mod_base = OTHER; note = 2-fluororibose cytosine
  modified_base 10: mod_base = um
  modified_base 10..11: mod_base = OTHER; note = S-phosphorothioate
  modified_base 11: mod_base = OTHER; note = 2-fluororibose uracil
  modified_base 11..12: mod_base = OTHER; note R-N-(1,3-dimethylimidazolidin-2-ylidene)phosphoramidate
  modified_base 12: mod_base = cm
  modified_base 13: mod_base = OTHER; note = 2-fluororibose adenine
  modified_base 13..14: mod_base = OTHER; note = S-phosphorothioate
  modified_base 14: mod_base = OTHER; note = 2-fluororibose guanine
  modified_base 14..15: mod_base = OTHER; note R-N-(1,3-dimethylimidazolidin-2-ylidene)phosphoramidate
  modified_base 15: mod_base = OTHER; note = 2-fluororibose uracil
  modified_base 16: mod_base = cm
  modified_base 16..17: mod_base = OTHER; note = S-phosphorothioate
  modified_base 17: mod_base = OTHER; note = 2-fluororibose cytosine
  modified_base 17..18: mod_base = OTHER; note = S-phosphorothioate
  modified_base 18: mod_base = OTHER; note = 2-fluororibose cytosine
  modified_base 18..19: mod_base = OTHER; note = S-phosphorothioate
  modified_base 19: mod_base = OTHER; note = 2-fluororibose uracil
  modified_base 19..20: mod_base = OTHER; note = S-phosphorothioate
  modified_base 20: mod_base = um
  modified_base 21: mod_base = um
  modified_base 22: mod_base = OTHER; note = 2-fluororibose cytosine
  modified_base 22..23: mod_base = OTHER; note = S-phosphorothioate
  modified_base 23: mod_base = OTHER; note = deoxyribose thymine
  modified_base 23..24: mod_base = OTHER; note = S-phosphorothioate
  modified_base 24: mod_base = OTHER; note = deoxyribose uracil (position 3 connectivity)
  modified_base 24..25: mod_base = OTHER; note = S-phosphorothioate
  modified_base 25: mod_base = OTHER; note = deoxyribose inosine
  modified_base 25..26: mod_base = OTHER; note = S-N-(di(piperidin-1-yl)methylene)phosphoramidate
  modified_base 26: mod_base = um
  modified_base 27: mod_base = OTHER; note = 2-fluororibose cytosine
  modified_base 27..28: mod_base = OTHER; note = S-phosphorothioate
  modified_base 28: mod_base = gm
  modified_base 28..29: mod_base = OTHER; note = S-phosphorothioate
  modified_base 29: mod_base = OTHER; note = 2-O-methylribose adenine
  modified_base 29..30: mod_base = OTHER; note R-N-(1,3-dimethylimidazolidin-2-ylidene)phosphoramidate
  modified_base 30: mod_base = um
  source 1..30: mol_type = other RNA

SEQ ID NO: 553 - RNA, 30 nt, synthetic construct; identical to SEQ ID NO: 273
  misc_feature 1..30: note = Synthetic: WV-48458
  misc_feature 1..30: note = Synthetic: ADR-0104190
  modified_base 1: mod_base = cm
  modified_base 1..2: mod_base = OTHER; note R-N-(1,3-dimethylimidazolidin-2-ylidene)phosphoramidate
  modified_base 2: mod_base = cm
  modified_base 2..3: mod_base = OTHER; note = S-phosphorothioate
  modified_base 3: mod_base = cm
  modified_base 3..4: mod_base = OTHER; note = S-phosphorothioate
  modified_base 4: mod_base = OTHER; note = 2-fluororibose adenine
  modified_base 4..5: mod_base = OTHER; note = S-phosphorothioate
  modified_base 5: mod_base = OTHER; note = 2-fluororibose guanine
  modified_base 5..6: mod_base = OTHER; note = S-phosphorothioate
  modified_base 6: mod_base = cm
  modified_base 7: mod_base = OTHER; note = 2-O-methylribose adenine
  modified_base 7..8: mod_base = OTHER; note = S-phosphorothioate
  modified_base 8: mod_base = OTHER; note = 2-fluororibose guanine
  modified_base 8..9: mod_base = OTHER; note = S-phosphorothioate
  modified_base 9: mod_base = OTHER; note = 2-fluororibose cytosine
  modified_base 10: mod_base = um
  modified_base 10..11: mod_base = OTHER; note = S-phosphorothioate
  modified_base 11: mod_base = OTHER; note = 2-fluororibose uracil
  modified_base 11..12: mod_base = OTHER; note R-N-(1,3-dimethylimidazolidin-2-ylidene)phosphoramidate
  modified_base 12: mod_base = cm
  modified_base 13: mod_base = OTHER; note = 2-fluororibose adenine
  modified_base 13..14: mod_base = OTHER; note = S-phosphorothioate
  modified_base 14: mod_base = OTHER; note = 2-fluororibose guanine
  modified_base 14..15: mod_base = OTHER; note R-N-(1,3-dimethylimidazolidin-2-ylidene)phosphoramidate
  modified_base 15: mod_base = OTHER; note = 2-fluororibose uracil
  modified_base 16: mod_base = cm
  modified_base 16..17: mod_base = OTHER; note = S-phosphorothioate
  modified_base 17: mod_base = OTHER; note = 2-fluororibose cytosine
  modified_base 17..18: mod_base = OTHER; note = S-phosphorothioate
  modified_base 18: mod_base = OTHER; note = 2-fluororibose cytosine
  modified_base 18..19: mod_base = OTHER; note = S-phosphorothioate
  modified_base 19: mod_base = OTHER; note = 2-fluororibose uracil
  modified_base 19..20: mod_base = OTHER; note = S-phosphorothioate
  modified_base 20: mod_base = um
  modified_base 21: mod_base = um
  modified_base 22: mod_base = OTHER; note = 2-fluororibose cytosine
  modified_base 22..23: mod_base = OTHER; note = S-phosphorothioate
  modified_base 23: mod_base = OTHER; note = deoxyribose thymine
  modified_base 23..24: mod_base = OTHER; note = S-phosphorothioate
  modified_base 24: mod_base = OTHER; note = deoxyribose uracil (position 3 connectivity)
  modified_base 24..25: mod_base = OTHER; note = S-phosphorothioate
  modified_base 25: mod_base = OTHER; note = deoxyribose inosine
  modified_base 25..26: mod_base = OTHER; note S-N-(1,3-dimethyltetrahydropyrimidin-2(1H)-ylidene)phosphor amidate
  modified_base 26: mod_base = um
  modified_base 27: mod_base = OTHER; note = 2-fluororibose cytosine
  modified_base 27..28: mod_base = OTHER; note = S-phosphorothioate
  modified_base 28: mod_base = gm
  modified_base 28..29: mod_base = OTHER; note = S-phosphorothioate
  modified_base 29: mod_base = OTHER; note = 2-O-methylribose adenine
  modified_base 29..30: mod_base = OTHER; note R-N-(1,3-dimethylimidazolidin-2-ylidene)phosphoramidate
  modified_base 30: mod_base = um
  source 1..30: mol_type = other RNA

SEQ ID NO: 554 - RNA, 30 nt, synthetic construct; identical to SEQ ID NO: 273
  misc_feature 1..30: note = Synthetic: WV-48459
  misc_feature 1..30: note = Synthetic: ADR-0104191
  modified_base 1: mod_base = cm
  modified_base 1..2: mod_base = OTHER; note R-N-(1,3-dimethylimidazolidin-2-ylidene)phosphoramidate
  modified_base 2: mod_base = cm
  modified_base 2..3: mod_base = OTHER; note = S-phosphorothioate
  modified_base 3: mod_base = cm
  modified_base 3..4: mod_base = OTHER; note = S-phosphorothioate
  modified_base 4: mod_base = OTHER; note = 2-fluororibose adenine
  modified_base 4..5: mod_base = OTHER; note = S-phosphorothioate
  modified_base 5: mod_base = OTHER; note = 2-fluororibose guanine
  modified_base 5..6: mod_base = OTHER; note = S-phosphorothioate
  modified_base 6: mod_base = cm
  modified_base 7: mod_base = OTHER; note = 2-O-methylribose adenine
  modified_base 7..8: mod_base = OTHER; note = S-phosphorothioate
  modified_base 8: mod_base = OTHER; note = 2-fluororibose guanine
  modified_base 8..9: mod_base = OTHER; note = S-phosphorothioate
  modified_base 9: mod_base = OTHER; note = 2-fluororibose cytosine
  modified_base 10: mod_base = um
  modified_base 10..11: mod_base = OTHER; note = S-phosphorothioate
  modified_base 11: mod_base = OTHER; note = 2-fluororibose uracil
  modified_base 11..12: mod_base = OTHER; note R-N-(1,3-dimethylimidazolidin-2-ylidene)phosphoramidate
  modified_base 12: mod_base = cm
  modified_base 13: mod_base = OTHER; note = 2-fluororibose adenine
  modified_base 13..14: mod_base = OTHER; note = S-phosphorothioate
  modified_base 14: mod_base = OTHER; note = 2-fluororibose guanine
  modified_base 14..15: mod_base = OTHER; note R-N-(1,3-dimethylimidazolidin-2-ylidene)phosphoramidate
  modified_base 15: mod_base = OTHER; note = 2-fluororibose uracil
  modified_base 16: mod_base = cm
  modified_base 16..17: mod_base = OTHER; note = S-phosphorothioate
  modified_base 17: mod_base = OTHER; note = 2-fluororibose cytosine
  modified_base 17..18: mod_base = OTHER; note = S-phosphorothioate
  modified_base 18: mod_base = OTHER; note = 2-fluororibose cytosine
  modified_base 18..19: mod_base = OTHER; note = S-phosphorothioate
  modified_base 19: mod_base = OTHER; note = 2-fluororibose uracil
  modified_base 19..20: mod_base = OTHER; note = S-phosphorothioate
  modified_base 20: mod_base = um
  modified_base 21: mod_base = um
  modified_base 22: mod_base = OTHER; note = 2-fluororibose cytosine
  modified_base 22..23: mod_base = OTHER; note = S-phosphorothioate
  modified_base 23: mod_base = OTHER; note = deoxyribose thymine
  modified_base 23..24: mod_base = OTHER; note = S-phosphorothioate
  modified_base 24: mod_base = OTHER; note = deoxyribose uracil (position 3 connectivity)
  modified_base 24..25: mod_base = OTHER; note = S-phosphorothioate
  modified_base 25: mod_base = OTHER; note = deoxyribose inosine
  modified_base 25..26: mod_base = OTHER; note S-N-(1,3-dimethyl-1,3-diazepan-2-ylidene)phosphoramidate
  modified_base 26: mod_base = um
  modified_base 27: mod_base = OTHER; note = 2-fluororibose cytosine
  modified_base 27..28: mod_base = OTHER; note = S-phosphorothioate
  modified_base 28: mod_base = gm
  modified_base 28..29: mod_base = OTHER; note = S-phosphorothioate
  modified_base 29: mod_base = OTHER; note = 2-O-methylribose adenine
  modified_base 29..30: mod_base = OTHER; note R-N-(1,3-dimethylimidazolidin-2-ylidene)phosphoramidate
  modified_base 30: mod_base = um
  source 1..30: mol_type = other RNA

SEQ ID NO: 555 - RNA, 30 nt, synthetic construct; identical to SEQ ID NO: 273
  misc_feature 1..30: note = Synthetic: WV-49085
  misc_feature 1..30: note = Synthetic: ADR-0100585
  modified_base 1: mod_base = OTHER; note = triantennary GalNAc with C12 linker linked to 6-aminohexanol linked by phosphate to the 5' end of 2-O-methylribose cytosine
  modified_base 1..2: mod_base = OTHER; note R-N-(1,3-dimethylimidazolidin-2-ylidene)phosphoramidate
  modified_base 2: mod_base = cm
  modified_base 2..3: mod_base = OTHER; note = S-phosphorothioate
  modified_base 3: mod_base = cm
  modified_base 3..4: mod_base = OTHER; note = S-phosphorothioate
  modified_base 4: mod_base = OTHER; note = 2-fluororibose adenine
  modified_base 4..5: mod_base = OTHER; note = S-phosphorothioate
  modified_base 5: mod_base = OTHER; note = 2-fluororibose guanine
  modified_base 5..6: mod_base = OTHER; note = S-phosphorothioate
  modified_base 6: mod_base = OTHER; note = 2-O-methoxyethylribose 5-methyl-cytidine
  modified_base 7: mod_base = OTHER; note = 2-O-methoxyethylribose adenine
  modified_base 8: mod_base = OTHER; note = 2-fluororibose guanine
  modified_base 8..9: mod_base = OTHER; note = S-phosphorothioate
  modified_base 9: mod_base = OTHER; note = 2-fluororibose cytosine
  modified_base 9..10: mod_base = OTHER; note = S-phosphorothioate
  modified_base 10: mod_base = OTHER; note = 2-O-methoxyethylribose thymine
  modified_base 11: mod_base = OTHER; note = 2-fluororibose uracil
  modified_base 11..12: mod_base = OTHER; note R-N-(1,3-dimethylimidazolidin-2-ylidene)phosphoramidate
  modified_base 12: mod_base = cm
  modified_base 13: mod_base = OTHER; note = 2-fluororibose adenine
  modified_base 13..14: mod_base = OTHER; note = S-phosphorothioate
  modified_base 14: mod_base = gm
  modified_base 14..15: mod_base = OTHER; note R-N-(1,3-dimethylimidazolidin-2-ylidene)phosphoramidate
  modified_base 15: mod_base = OTHER; note = 2-fluororibose uracil
  modified_base 16: mod_base = cm
  modified_base 16..17: mod_base = OTHER; note = S-phosphorothioate
  modified_base 17: mod_base = OTHER; note = 2-fluororibose cytosine
  modified_base 17..18: mod_base = OTHER; note = S-phosphorothioate
  modified_base 18: mod_base = OTHER; note = 2-fluororibose cytosine
  modified_base 18..19: mod_base = OTHER; note = S-phosphorothioate
  modified_base 19: mod_base = OTHER; note = 2-fluororibose uracil
  modified_base 19..20: mod_base = OTHER; note R-N-(1,3-dimethylimidazolidin-2-ylidene)phosphoramidate
  modified_base 20: mod_base = OTHER; note = 2-O-methoxyethylribose thymine
  modified_base 21: mod_base = OTHER; note = 2-O-methoxyethylribose thymine
  modified_base 22: mod_base = OTHER; note = 2-fluororibose cytosine
  modified_base 22..23: mod_base = OTHER; note = S-phosphorothioate
  modified_base 23: mod_base = OTHER; note = deoxyribose thymine
  modified_base 23..24: mod_base = OTHER; note = S-phosphorothioate
  modified_base 24: mod_base = OTHER; note = deoxyribose uracil (position 3 connectivity)
  modified_base 24..25: mod_base = OTHER; note = S-phosphorothioate
  modified_base 25: mod_base = OTHER; note = deoxyribose inosine
  modified_base 25..26: mod_base = OTHER; note S-N-(1,3-dimethylimidazolidin-2-ylidene)phosphoramidate
  modified_base 26: mod_base = um
  modified_base 27: mod_base = OTHER; note = 2-fluororibose cytosine
  modified_base 27..28: mod_base = OTHER; note = S-phosphorothioate
  modified_base 28: mod_base = gm
  modified_base 28..29: mod_base = OTHER; note = S-phosphorothioate
  modified_base 29: mod_base = OTHER; note = 2-O-methylribose adenine
  modified_base 29..30: mod_base = OTHER; note R-N-(1,3-dimethylimidazolidin-2-ylidene)phosphoramidate
  modified_base 30: mod_base = um
  source 1..30: mol_type = other RNA

SEQ ID NO: 556 - RNA, 30 nt, synthetic construct; identical to SEQ ID NO: 273
  misc_feature 1..30: note = Synthetic: WV-49086
  misc_feature 1..30: note = Synthetic: ADR-0100586
  modified_base 1: mod_base = OTHER; note = triantennary GalNAc with C12 linker linked to 6-aminohexanol linked by phosphate to the 5' end of 2-O-methylribose cytosine
  modified_base 1..2: mod_base = OTHER; note R-N-(1,3-dimethylimidazolidin-2-ylidene)phosphoramidate
  modified_base 2: mod_base = cm
  modified_base 2..3: mod_base = OTHER; note = S-phosphorothioate
  modified_base 3: mod_base = cm
  modified_base 3..4: mod_base = OTHER; note = S-phosphorothioate
  modified_base 4: mod_base = OTHER; note = 2-fluororibose adenine
  modified_base 4..5: mod_base = OTHER; note = S-phosphorothioate
  modified_base 5: mod_base = OTHER; note = 2-fluororibose guanine
  modified_base 5..6: mod_base = OTHER; note = S-phosphorothioate
  modified_base 6: mod_base = OTHER; note = 2-O-methoxyethylribose 5-methyl-cytidine
  modified_base 7: mod_base = OTHER; note = 2-O-methoxyethylribose adenine
  modified_base 8: mod_base = OTHER; note = 2-fluororibose guanine
  modified_base 8..9: mod_base = OTHER; note = S-phosphorothioate
  modified_base 9: mod_base = OTHER; note = 2-fluororibose cytosine
  modified_base 9..10: mod_base = OTHER; note = S-phosphorothioate
  modified_base 10: mod_base = OTHER; note = 2-O-methoxyethylribose thymine
  modified_base 11: mod_base = OTHER; note = 2-fluororibose uracil
  modified_base 11..12: mod_base = OTHER; note R-N-(1,3-dimethylimidazolidin-2-ylidene)phosphoramidate
  modified_base 12: mod_base = cm
  modified_base 13: mod_base = OTHER; note = 2-fluororibose adenine
  modified_base 13..14: mod_base = OTHER; note = S-phosphorothioate
  modified_base 14: mod_base = gm
  modified_base 14..15: mod_base = OTHER; note R-N-(1,3-dimethylimidazolidin-2-ylidene)phosphoramidate
  modified_base 15: mod_base = OTHER; note = 2-fluororibose uracil
  modified_base 16: mod_base = OTHER; note = 2-O-methoxyethylribose 5-methyl-cytidine
  modified_base 16..17: mod_base = OTHER; note = S-phosphorothioate
  modified_base 17: mod_base = OTHER; note = 2-fluororibose cytosine
  modified_base 17..18: mod_base = OTHER; note = S-phosphorothioate
  modified_base 18: mod_base = OTHER; note = 2-fluororibose cytosine
  modified_base 18..19: mod_base = OTHER; note = S-phosphorothioate
  modified_base 19: mod_base = OTHER; note = 2-fluororibose uracil
  modified_base 19..20: mod_base = OTHER; note R-N-(1,3-dimethylimidazolidin-2-ylidene)phosphoramidate
  modified_base 20: mod_base = OTHER; note = 2-O-methoxyethylribose thymine
  modified_base 21: mod_base = OTHER; note = 2-O-methoxyethylribose thymine
  modified_base 22: mod_base = OTHER; note = 2-fluororibose cytosine
  modified_base 22..23: mod_base = OTHER; note = S-phosphorothioate
  modified_base 23: mod_base = OTHER; note = deoxyribose thymine
  modified_base 23..24: mod_base = OTHER; note = S-phosphorothioate
  modified_base 24: mod_base = OTHER; note = deoxyribose uracil (position 3 connectivity)
  modified_base 24..25: mod_base = OTHER; note = S-phosphorothioate
  modified_base 25: mod_base = OTHER; note = deoxyribose inosine
  modified_base 25..26: mod_base = OTHER; note S-N-(1,3-dimethylimidazolidin-2-ylidene)phosphoramidate
  modified_base 26: mod_base = um
  modified_base 27: mod_base = OTHER; note = 2-fluororibose cytosine
  modified_base 27..28: mod_base = OTHER; note = S-phosphorothioate
  modified_base 28: mod_base = gm
  modified_base 28..29: mod_base = OTHER; note = S-phosphorothioate
  modified_base 29: mod_base = OTHER; note = 2-O-methylribose adenine
  modified_base 29..30: mod_base = OTHER; note R-N-(1,3-dimethylimidazolidin-2-ylidene)phosphoramidate
  modified_base 30: mod_base = um
  source 1..30: mol_type = other RNA

SEQ ID NO: 557 - RNA, 30 nt, synthetic construct; identical to SEQ ID NO: 273
  misc_feature 1..30: note = Synthetic: WV-49087
  misc_feature 1..30: note = Synthetic: ADR-0100587
  modified_base 1: mod_base = OTHER; note = triantennary GalNAc with C12 linker linked to 6-aminohexanol linked by phosphate to the 5' end of 2-O-methylribose cytosine
  modified_base 1..2: mod_base = OTHER; note R-N-(1,3-dimethylimidazolidin-2-ylidene)phosphoramidate
  modified_base 2: mod_base = cm
  modified_base 2..3: mod_base = OTHER; note = S-phosphorothioate
  modified_base 3: mod_base = cm
  modified_base 3..4: mod_base = OTHER; note = S-phosphorothioate
  modified_base 4: mod_base = OTHER; note = 2-fluororibose adenine
  modified_base 4..5: mod_base = OTHER; note = S-phosphorothioate
  modified_base 5: mod_base = OTHER; note = 2-fluororibose guanine
  modified_base 5..6: mod_base = OTHER; note = S-phosphorothioate
  modified_base 6: mod_base = OTHER; note = 2-O-methoxyethylribose 5-methyl-cytidine
  modified_base 7: mod_base = OTHER; note = 2-O-methoxyethylribose adenine
  modified_base 8: mod_base = OTHER; note = 2-fluororibose guanine
  modified_base 8..9: mod_base = OTHER; note = S-phosphorothioate
  modified_base 9: mod_base = cm
  modified_base 10: mod_base = OTHER; note = 2-O-methoxyethylribose thymine
  modified_base 10..11: mod_base = OTHER; note = S-phosphorothioate
  modified_base 11: mod_base = um
  modified_base 11..12: mod_base = OTHER; note R-N-(1,3-dimethylimidazolidin-2-ylidene)phosphoramidate
  modified_base 12: mod_base = cm
  modified_base 13: mod_base = OTHER; note = 2-fluororibose adenine
  modified_base 13..14: mod_base = OTHER; note = S-phosphorothioate
  modified_base 14: mod_base = OTHER; note = 2-fluororibose guanine
  modified_base 14..15: mod_base = OTHER; note R-N-(1,3-dimethylimidazolidin-2-ylidene)phosphoramidate
  modified_base 15: mod_base = um
  modified_base 16: mod_base = cm
  modified_base 17: mod_base = cm
  modified_base 17..18: mod_base = OTHER; note = S-phosphorothioate
  modified_base 18: mod_base = OTHER; note = 2-fluororibose cytosine
  modified_base 18..19: mod_base = OTHER; note = S-phosphorothioate
  modified_base 19: mod_base = OTHER; note = 2-fluororibose uracil
  modified_base 19..20: mod_base = OTHER; note = S-phosphorothioate
  modified_base 20: mod_base = OTHER; note = 2-O-methoxyethylribose thymine
  modified_base 21: mod_base = OTHER; note = 2-O-methoxyethylribose thymine
  modified_base 22: mod_base = OTHER; note = 2-fluororibose cytosine
  modified_base 22..23: mod_base = OTHER; note = S-phosphorothioate
  modified_base 23: mod_base = OTHER; note = deoxyribose thymine
  modified_base 23..24: mod_base = OTHER; note = S-phosphorothioate
  modified_base 24: mod_base = OTHER; note = deoxyribose uracil (position 3 connectivity)
  modified_base 24..25: mod_base = OTHER; note = S-phosphorothioate
  modified_base 25: mod_base = OTHER; note = deoxyribose inosine
  modified_base 25..26: mod_base = OTHER; note S-N-(1,3-dimethylimidazolidin-2-ylidene)phosphoramidate
  modified_base 26: mod_base = um
  modified_base 27: mod_base = OTHER; note = 2-fluororibose cytosine
  modified_base 27..28: mod_base = OTHER; note = S-phosphorothioate
  modified_base 28: mod_base = gm
  modified_base 28..29: mod_base = OTHER; note = S-phosphorothioate
  modified_base 29: mod_base = OTHER; note = 2-O-methylribose adenine
  modified_base 29..30: mod_base = OTHER; note R-N-(1,3-dimethylimidazolidin-2-ylidene)phosphoramidate
  modified_base 30: mod_base = um
  source 1..30: mol_type = other RNA

SEQ ID NO: 558 - RNA, 30 nt, synthetic construct; identical to SEQ ID NO: 273
  misc_feature 1..30: note = Synthetic: WV-49088
  misc_feature 1..30: note = Synthetic: ADR-0100588
  modified_base 1: mod_base = OTHER; note = triantennary GalNAc with C12 linker linked to 6-aminohexanol linked by phosphate to the 5' end of 2-O-methylribose cytosine
  modified_base 1..2: mod_base = OTHER; note R-N-(1,3-dimethylimidazolidin-2-ylidene)phosphoramidate
  modified_base 2: mod_base = cm
  modified_base 2..3: mod_base = OTHER; note = S-phosphorothioate
  modified_base 3: mod_base = cm
  modified_base 3..4: mod_base = OTHER; note = S-phosphorothioate
  modified_base 4: mod_base = OTHER; note = 2-fluororibose adenine
  modified_base 4..5: mod_base = OTHER; note = S-phosphorothioate
  modified_base 5: mod_base = OTHER; note = 2-fluororibose guanine
  modified_base 5..6: mod_base = OTHER; note = S-phosphorothioate
  modified_base 6: mod_base = OTHER; note = 2-O-methoxyethylribose 5-methyl-cytidine
  modified_base 7: mod_base = OTHER; note = 2-O-methoxyethylribose adenine
  modified_base 8: mod_base = OTHER; note = 2-fluororibose guanine
  modified_base 8..9: mod_base = OTHER; note = S-phosphorothioate
  modified_base 9: mod_base = cm
  modified_base 10: mod_base = OTHER; note = 2-O-methoxyethylribose thymine
  modified_base 10..11: mod_base = OTHER; note = S-phosphorothioate
  modified_base 11: mod_base = um
  modified_base 11..12: mod_base = OTHER; note R-N-(1,3-dimethylimidazolidin-2-ylidene)phosphoramidate
  modified_base 12: mod_base = cm
  modified_base 13: mod_base = OTHER; note = 2-fluororibose adenine
  modified_base 13..14: mod_base = OTHER; note = S-phosphorothioate
  modified_base 14: mod_base = OTHER; note = 2-fluororibose guanine
  modified_base 14..15: mod_base = OTHER; note R-N-(1,3-dimethylimidazolidin-2-ylidene)phosphoramidate
  modified_base 15: mod_base = um
  modified_base 16: mod_base = OTHER; note = 2-O-methoxyethylribose 5-methyl-cytidine
  modified_base 17: mod_base = cm
  modified_base 17..18: mod_base = OTHER; note = S-phosphorothioate
  modified_base 18: mod_base = OTHER; note = 2-fluororibose cytosine
  modified_base 18..19: mod_base = OTHER; note = S-phosphorothioate
  modified_base 19: mod_base = OTHER; note = 2-fluororibose uracil
  modified_base 19..20: mod_base = OTHER; note = S-phosphorothioate
  modified_base 20: mod_base = OTHER; note = 2-O-methoxyethylribose thymine
  modified_base 21: mod_base = OTHER; note = 2-O-methoxyethylribose thymine
  modified_base 22: mod_base = OTHER; note = 2-fluororibose cytosine
  modified_base 22..23: mod_base = OTHER; note = S-phosphorothioate
  modified_base 23: mod_base = OTHER; note = deoxyribose thymine
  modified_base 23..24: mod_base = OTHER; note = S-phosphorothioate
  modified_base 24: mod_base = OTHER; note = deoxyribose uracil (position 3 connectivity)
  modified_base 24..25: mod_base = OTHER; note = S-phosphorothioate
  modified_base 25: mod_base = OTHER; note = deoxyribose inosine
  modified_base 25..26: mod_base = OTHER; note S-N-(1,3-dimethylimidazolidin-2-ylidene)phosphoramidate
  modified_base 26: mod_base = um
  modified_base 27: mod_base = OTHER; note = 2-fluororibose cytosine
  modified_base 27..28: mod_base = OTHER; note = S-phosphorothioate
  modified_base 28: mod_base = gm
  modified_base 28..29: mod_base = OTHER; note = S-phosphorothioate
  modified_base 29: mod_base = OTHER; note = 2-O-methylribose adenine
  modified_base 29..30: mod_base = OTHER; note R-N-(1,3-dimethylimidazolidin-2-ylidene)phosphoramidate
  modified_base 30: mod_base = um
  source 1..30: mol_type = other RNA

SEQ ID NO: 559 - RNA, 30 nt, synthetic construct; identical to SEQ ID NO: 273
  misc_feature 1..30: note = Synthetic: WV-49089
  misc_feature 1..30: note = Synthetic: ADR-0100589
  modified_base 1: mod_base = OTHER; note = triantennary GalNAc with C12 linker linked to 6-aminohexanol linked by phosphate to the 5' end of 2-O-methylribose cytosine
  modified_base 1..2: mod_base = OTHER; note R-N-(1,3-dimethylimidazolidin-2-ylidene)phosphoramidate
  modified_base 2: mod_base = cm
  modified_base 2..3: mod_base = OTHER; note = S-phosphorothioate
  modified_base 3: mod_base = cm
  modified_base 3..4: mod_base = OTHER; note = S-phosphorothioate
  modified_base 4: mod_base = OTHER; note = 2-fluororibose adenine
  modified_base 4..5: mod_base = OTHER; note = S-phosphorothioate
  modified_base 5: mod_base = OTHER; note = 2-fluororibose guanine
  modified_base 5..6: mod_base = OTHER; note = S-phosphorothioate
  modified_base 6: mod_base = OTHER; note = 2-O-methoxyethylribose 5-methyl-cytidine
  modified_base 7: mod_base = OTHER; note = 2-O-methoxyethylribose adenine
  modified_base 8: mod_base = OTHER; note = 2-fluororibose guanine
  modified_base 8..9: mod_base = OTHER; note = S-phosphorothioate
  modified_base 9: mod_base = OTHER; note = 2-O-methoxyethylribose 5-methyl-cytidine
  modified_base 10: mod_base = OTHER; note = 2-O-methoxyethylribose thymine
  modified_base 10..11: mod_base = OTHER; note = S-phosphorothioate
  modified_base 11: mod_base = um
  modified_base 11..12: mod_base = OTHER; note R-N-(1,3-dimethylimidazolidin-2-ylidene)phosphoramidate
  modified_base 12: mod_base = OTHER; note = 2-O-methoxyethylribose 5-methyl-cytidine
  modified_base 13: mod_base = OTHER; note = 2-fluororibose adenine
  modified_base 13..14: mod_base = OTHER; note = S-phosphorothioate
  modified_base 14: mod_base = OTHER; note = 2-fluororibose guanine
  modified_base 14..15: mod_base = OTHER; note R-N-(1,3-dimethylimidazolidin-2-ylidene)phosphoramidate
  modified_base 15: mod_base = um
  modified_base 16: mod_base = OTHER; note = 2-O-methoxyethylribose 5-methyl-cytidine
  modified_base 17: mod_base = OTHER; note = 2-O-methoxyethylribose 5-methyl-cytidine
  modified_base 17..18: mod_base = OTHER; note = S-phosphorothioate
  modified_base 18: mod_base = OTHER; note = 2-fluororibose cytosine
  modified_base 18..19: mod_base = OTHER; note = S-phosphorothioate
  modified_base 19: mod_base = OTHER; note = 2-fluororibose uracil
  modified_base 19..20: mod_base = OTHER; note = S-phosphorothioate
  modified_base 20: mod_base = OTHER; note = 2-O-methoxyethylribose thymine
  modified_base 21: mod_base = OTHER; note = 2-O-methoxyethylribose thymine
  modified_base 22: mod_base = OTHER; note = 2-fluororibose cytosine
  modified_base 22..23: mod_base = OTHER; note = S-phosphorothioate
  modified_base 23: mod_base = OTHER; note = deoxyribose thymine
  modified_base 23..24: mod_base = OTHER; note = S-phosphorothioate
  modified_base 24: mod_base = OTHER; note = deoxyribose uracil (position 3 connectivity)
  modified_base 24..25: mod_base = OTHER; note = S-phosphorothioate
  modified_base 25: mod_base = OTHER; note = deoxyribose inosine
  modified_base 25..26: mod_base = OTHER; note S-N-(1,3-dimethylimidazolidin-2-ylidene)phosphoramidate
  modified_base 26: mod_base = um
  modified_base 27: mod_base = OTHER; note = 2-fluororibose cytosine
  modified_base 27..28: mod_base = OTHER; note = S-phosphorothioate
  modified_base 28: mod_base = gm
  modified_base 28..29: mod_base = OTHER; note = S-phosphorothioate
  modified_base 29: mod_base = OTHER; note = 2-O-methylribose adenine
  modified_base 29..30: mod_base = OTHER; note R-N-(1,3-dimethylimidazolidin-2-ylidene)phosphoramidate
  modified_base 30: mod_base = um
  source 1..30: mol_type = other RNA

SEQ ID NO: 560 - RNA, 30 nt, synthetic construct; identical to SEQ ID NO: 273
  misc_feature 1..30: note = Synthetic: WV-49090
  misc_feature 1..30: note = Synthetic: ADR-0100590
  modified_base 1: mod_base = OTHER; note = triantennary GalNAc with C12 linker linked to 6-aminohexanol linked by phosphate to the 5' end of 2-O-methylribose cytosine
  modified_base 1..2: mod_base = OTHER; note R-N-(1,3-dimethylimidazolidin-2-ylidene)phosphoramidate
  modified_base 2: mod_base = cm
  modified_base 2..3: mod_base = OTHER; note = S-phosphorothioate
  modified_base 3: mod_base = cm
  modified_base 3..4: mod_base = OTHER; note = S-phosphorothioate
  modified_base 4: mod_base = OTHER; note = 2-fluororibose adenine
  modified_base 4..5: mod_base = OTHER; note = S-phosphorothioate
  modified_base 5: mod_base = OTHER; note = 2-fluororibose guanine
  modified_base 5..6: mod_base = OTHER; note = S-phosphorothioate
  modified_base 6: mod_base = OTHER; note = 2-O-methoxyethylribose 5-methyl-cytidine
  modified_base 7: mod_base = OTHER; note = 2-O-methoxyethylribose adenine
  modified_base 8: mod_base = OTHER; note = 2-fluororibose guanine
  modified_base 8..9: mod_base = OTHER; note = S-phosphorothioate
  modified_base 9: mod_base = OTHER; note = 2-fluororibose cytosine
  modified_base 9..10: mod_base = OTHER; note = S-phosphorothioate
  modified_base 10: mod_base = um
  modified_base 11: mod_base = um
  modified_base 11..12: mod_base = OTHER; note R-N-(1,3-dimethylimidazolidin-2-ylidene)phosphoramidate
  modified_base 12: mod_base = cm
  modified_base 13: mod_base = OTHER; note = 2-fluororibose adenine
  modified_base 13..14: mod_base = OTHER; note = S-phosphorothioate
  modified_base 14: mod_base = OTHER; note = 2-fluororibose guanine
  modified_base 14..15: mod_base = OTHER; note R-N-(1,3-dimethylimidazolidin-2-ylidene)phosphoramidate
  modified_base 15: mod_base = OTHER; note = 2-fluororibose uracil
  modified_base 16: mod_base = OTHER; note = 2-O-methoxyethylribose 5-methyl-cytidine
  modified_base 16..17: mod_base = OTHER; note = S-phosphorothioate
  modified_base 17: mod_base = OTHER; note = 2-fluororibose cytosine
  modified_base 17..18: mod_base = OTHER; note = S-phosphorothioate
  modified_base 18: mod_base = cm
  modified_base 19: mod_base = um
  modified_base 19..20: mod_base = OTHER; note R-N-(1,3-dimethylimidazolidin-2-ylidene)phosphoramidate
  modified_base 20: mod_base = um
  modified_base 21: mod_base = OTHER; note = 2-O-methoxyethylribose thymine
  modified_base 22: mod_base = OTHER; note = 2-fluororibose cytosine
  modified_base 22..23: mod_base = OTHER; note = S-phosphorothioate
  modified_base 23: mod_base = OTHER; note = deoxyribose thymine
  modified_base 23..24: mod_base = OTHER; note = S-phosphorothioate
  modified_base 24: mod_base = OTHER; note = deoxyribose uracil (position 3 connectivity)
  modified_base 24..25: mod_base = OTHER; note = S-phosphorothioate
  modified_base 25: mod_base = OTHER; note = deoxyribose inosine
  modified_base 25..26: mod_base = OTHER; note S-N-(1,3-dimethylimidazolidin-2-ylidene)phosphoramidate
  modified_base 26: mod_base = um
  modified_base 27: mod_base = OTHER; note = 2-fluororibose cytosine
  modified_base 27..28: mod_base = OTHER; note = S-phosphorothioate
  modified_base 28: mod_base = gm
  modified_base 28..29: mod_base = OTHER; note = S-phosphorothioate
  modified_base 29: mod_base = OTHER; note = 2-O-methylribose adenine
  modified_base 29..30: mod_base = OTHER; note R-N-(1,3-dimethylimidazolidin-2-ylidene)phosphoramidate
  modified_base 30: mod_base = um
  source 1..30: mol_type = other RNA

SEQ ID NO: 561 - RNA, 30 nt, synthetic construct; identical to SEQ ID NO: 273
  misc_feature 1..30: note = Synthetic: WV-49092
  misc_feature 1..30: note = Synthetic: ADR-0100592
  modified_base 1: mod_base = OTHER; note = triantennary GalNAc with C12 linker linked to 6-aminohexanol linked by phosphate to the 5' end of 2-O-methylribose cytosine
  modified_base 1..2: mod_base = OTHER; note R-N-(1,3-dimethylimidazolidin-2-ylidene)phosphoramidate
  modified_base 2: mod_base = cm
  modified_base 2..3: mod_base = OTHER; note = S-phosphorothioate
  modified_base 3: mod_base = cm
  modified_base 3..4: mod_base = OTHER; note = S-phosphorothioate
  modified_base 4: mod_base = OTHER; note = 2-fluororibose adenine
  modified_base 4..5: mod_base = OTHER; note = S-phosphorothioate
  modified_base 5: mod_base = OTHER; note = 2-fluororibose guanine
  modified_base 5..6: mod_base = OTHER; note = S-phosphorothioate
  modified_base 6: mod_base = OTHER; note = 2-O-methoxyethylribose 5-methyl-cytidine
  modified_base 7: mod_base = OTHER; note = 2-O-methoxyethylribose adenine
  modified_base 8: mod_base = OTHER; note = 2-fluororibose guanine
  modified_base 8..9: mod_base = OTHER; note = S-phosphorothioate
  modified_base 9: mod_base = OTHER; note = 2-fluororibose cytosine
  modified_base 9..10: mod_base = OTHER; note = S-phosphorothioate
  modified_base 10: mod_base = OTHER; note = 2-O-methoxyethylribose thymine
  modified_base 11: mod_base = OTHER; note = 2-fluororibose uracil
  modified_base 11..12: mod_base = OTHER; note R-N-(1,3-dimethylimidazolidin-2-ylidene)phosphoramidate
  modified_base 12: mod_base = cm
  modified_base 13: mod_base = OTHER; note = 2-fluororibose adenine
  modified_base 13..14: mod_base = OTHER; note = S-phosphorothioate
  modified_base 14: mod_base = OTHER; note = 2-fluororibose guanine
  modified_base 14..15: mod_base = OTHER; note R-N-(1,3-dimethylimidazolidin-2-ylidene)phosphoramidate
  modified_base 15: mod_base = OTHER; note = 2-fluororibose uracil
  modified_base 16: mod_base = OTHER; note = 2-O-methoxyethylribose 5-methyl-cytidine
  modified_base 16..17: mod_base = OTHER; note = S-phosphorothioate
  modified_base 17: mod_base = OTHER; note = 2-fluororibose cytosine
  modified_base 17..18: mod_base = OTHER; note = S-phosphorothioate
  modified_base 18: mod_base = OTHER; note = 2-fluororibose cytosine
  modified_base 18..19: mod_base = OTHER; note = S-phosphorothioate
  modified_base 19: mod_base = OTHER; note = 2-fluororibose uracil
  modified_base 19..20: mod_base = OTHER; note R-N-(1,3-dimethylimidazolidin-2-ylidene)phosphoramidate
  modified_base 20: mod_base = OTHER; note = 2-O-methoxyethylribose thymine
  modified_base 21: mod_base = OTHER; note = 2-O-methoxyethylribose thymine
  modified_base 22: mod_base = OTHER; note = 2-fluororibose cytosine
  modified_base 22..23: mod_base = OTHER; note = S-phosphorothioate
  modified_base 23: mod_base = OTHER; note = deoxyribose thymine
  modified_base 23..24: mod_base = OTHER; note = S-phosphorothioate
  modified_base 24: mod_base = OTHER; note = deoxyribose uracil (position 3 connectivity)
  modified_base 24..25: mod_base = OTHER; note = S-phosphorothioate
  modified_base 25: mod_base = OTHER; note = deoxyribose inosine
  modified_base 25..26: mod_base = OTHER; note S-N-(1,3-dimethylimidazolidin-2-ylidene)phosphoramidate
  modified_base 26: mod_base = um
  modified_base 27: mod_base = OTHER; note = 2-fluororibose cytosine
  modified_base 27..28: mod_base = OTHER; note = S-phosphorothioate
  modified_base 28: mod_base = gm
  modified_base 28..29: mod_base = OTHER; note = S-phosphorothioate
  modified_base 29: mod_base = OTHER; note = 2-O-methylribose adenine
  modified_base 29..30: mod_base = OTHER; note R-N-(1,3-dimethylimidazolidin-2-ylidene)phosphoramidate
  modified_base 30: mod_base = um
  source 1..30: mol_type = other RNA

SEQ ID NO: 562 - RNA, 30 nt, synthetic construct; identical to SEQ ID NO: 273
  misc_feature 1..30: note = Synthetic: WV-49093
  misc_feature 1..30: note = Synthetic: ADR-0100593
  modified_base 1: mod_base = OTHER; note = triantennary GalNAc with C12 linker linked to 6-aminohexanol linked by phosphate to the 5' end of 2-O-methylribose cytosine
  modified_base 1..2: mod_base = OTHER; note R-N-(1,3-dimethylimidazolidin-2-ylidene)phosphoramidate
  modified_base 2: mod_base = cm
  modified_base 2..3: mod_base = OTHER; note = S-phosphorothioate
  modified_base 3: mod_base = cm
  modified_base 3..4: mod_base = OTHER; note = S-phosphorothioate
  modified_base 4: mod_base = OTHER; note = 2-fluororibose adenine
  modified_base 4..5: mod_base = OTHER; note = S-phosphorothioate
  modified_base 5: mod_base = OTHER; note = 2-fluororibose guanine
  modified_base 5..6: mod_base = OTHER; note = S-phosphorothioate
  modified_base 6: mod_base = OTHER; note = 2-O-methoxyethylribose 5-methyl-cytidine
  modified_base 7: mod_base = OTHER; note = 2-O-methylribose adenine
  modified_base 7..8: mod_base = OTHER; note = S-phosphorothioate
  modified_base 8: mod_base = OTHER; note = 2-fluororibose guanine
  modified_base 8..9: mod_base = OTHER; note = S-phosphorothioate
  modified_base 9: mod_base = OTHER; note = 2-fluororibose cytosine
  modified_base 10: mod_base = OTHER; note = 2-O-methoxyethylribose thymine
  modified_base 10..11: mod_base = OTHER; note = S-phosphorothioate
  modified_base 11: mod_base = OTHER; note = 2-fluororibose uracil
  modified_base 11..12: mod_base = OTHER; note R-N-(1,3-dimethylimidazolidin-2-ylidene)phosphoramidate
  modified_base 12: mod_base = cm
  modified_base 13: mod_base = OTHER; note = 2-fluororibose adenine
  modified_base 13..14: mod_base = OTHER; note = S-phosphorothioate
  modified_base 14: mod_base = OTHER; note = 2-fluororibose guanine
  modified_base 14..15: mod_base = OTHER; note R-N-(1,3-dimethylimidazolidin-2-ylidene)phosphoramidate
  modified_base 15: mod_base = OTHER; note = 2-fluororibose uracil
  modified_base 16: mod_base = OTHER; note = 2-O-methoxyethylribose 5-methyl-cytidine
  modified_base 16..17: mod_base = OTHER; note = S-phosphorothioate
  modified_base 17: mod_base = OTHER; note = 2-fluororibose cytosine
  modified_base 17..18: mod_base = OTHER; note = S-phosphorothioate
  modified_base 18: mod_base = OTHER; note = 2-fluororibose cytosine
  modified_base 18..19: mod_base = OTHER; note = S-phosphorothioate
  modified_base 19: mod_base = OTHER; note = 2-fluororibose uracil
  modified_base 19..20: mod_base = OTHER; note = S-phosphorothioate
  modified_base 20: mod_base = OTHER; note = 2-O-methoxyethylribose thymine
  modified_base 21: mod_base = OTHER; note = 2-O-methoxyethylribose thymine
  modified_base 22: mod_base = OTHER; note = 2-fluororibose cytosine
  modified_base 22..23: mod_base = OTHER; note = S-phosphorothioate
  modified_base 23: mod_base = OTHER; note = deoxyribose thymine
  modified_base 23..24: mod_base = OTHER; note = S-phosphorothioate
  modified_base 24: mod_base = OTHER; note = deoxyribose uracil (position 3 connectivity)
  modified_base 24..25: mod_base = OTHER; note = S-phosphorothioate
  modified_base 25: mod_base = OTHER; note = deoxyribose inosine
  modified_base 25..26: mod_base = OTHER; note S-N-(1,3-dimethylimidazolidin-2-ylidene)phosphoramidate
  modified_base 26: mod_base = um
  modified_base 27: mod_base = OTHER; note = 2-fluororibose cytosine
  modified_base 27..28: mod_base = OTHER; note = S-phosphorothioate
  modified_base 28: mod_base = gm
  modified_base 28..29: mod_base = OTHER; note = S-phosphorothioate
  modified_base 29: mod_base = OTHER; note = 2-O-methylribose adenine
  modified_base 29..30: mod_base = OTHER; note R-N-(1,3-dimethylimidazolidin-2-ylidene)phosphoramidate
  modified_base 30: mod_base = um
  source 1..30: mol_type = other RNA

SEQ ID NO: 563 - RNA, 30 nt, synthetic construct; identical to SEQ ID NO: 273
  misc_feature 1..30: note = Synthetic: WV-46460
  misc_feature 1..30: note = Synthetic: ADR-0104089
  modified_base 1: mod_base = cm
  modified_base 1..2: mod_base = OTHER; note R-N-(1,3-dimethylimidazolidin-2-ylidene)phosphoramidate
  modified_base 2: mod_base = cm
  modified_base 2..3: mod_base = OTHER; note = S-phosphorothioate
  modified_base 3: mod_base = cm
  modified_base 3..4: mod_base = OTHER; note = S-phosphorothioate
  modified_base 4: mod_base = OTHER; note = 2-fluororibose adenine
  modified_base 4..5: mod_base = OTHER; note = S-phosphorothioate
  modified_base 5: mod_base = OTHER; note = 2-fluororibose guanine
  modified_base 5..6: mod_base = OTHER; note = S-phosphorothioate
  modified_base 6: mod_base = OTHER; note = 2-O-methoxyethylribose 5-methyl-cytidine
  modified_base 7: mod_base = OTHER; note = 2-O-methoxyethylribose adenine
  modified_base 8: mod_base = OTHER; note = 2-fluororibose guanine
  modified_base 8..9: mod_base = OTHER; note = S-phosphorothioate
  modified_base 9: mod_base = OTHER; note = 2-fluororibose cytosine
  modified_base 9..10: mod_base = OTHER; note = S-phosphorothioate
  modified_base 10: mod_base = OTHER; note = 2-O-methoxyethylribose thymine
  modified_base 11: mod_base = OTHER; note = 2-fluororibose uracil
  modified_base 11..12: mod_base = OTHER; note R-N-(1,3-dimethylimidazolidin-2-ylidene)phosphoramidate
  modified_base 12: mod_base = cm
  modified_base 13: mod_base = OTHER; note = 2-fluororibose adenine
  modified_base 13..14: mod_base = OTHER; note = S-phosphorothioate
  modified_base 14: mod_base = OTHER; note = 2-fluororibose guanine
  modified_base 14..15: mod_base = OTHER; note R-N-(1,3-dimethylimidazolidin-2-ylidene)phosphoramidate
  modified_base 15: mod_base = OTHER; note = 2-fluororibose uracil
  modified_base 16: mod_base = cm
  modified_base 16..17: mod_base = OTHER; note = S-phosphorothioate
  modified_base 17: mod_base = OTHER; note = 2-fluororibose cytosine
  modified_base 17..18: mod_base = OTHER; note = S-phosphorothioate
  modified_base 18: mod_base = OTHER; note = 2-fluororibose cytosine
  modified_base 18..19: mod_base = OTHER; note = S-phosphorothioate
  modified_base 19: mod_base = OTHER; note = 2-fluororibose uracil
  modified_base 19..20: mod_base = OTHER; note R-N-(1,3-dimethylimidazolidin-2-ylidene)phosphoramidate
  modified_base 20: mod_base = OTHER; note = 2-O-methoxyethylribose thymine
  modified_base 21: mod_base = OTHER; note = 2-O-methoxyethylribose thymine
  modified_base 22: mod_base = OTHER; note = 2-fluororibose cytosine
  modified_base 22..23: mod_base = OTHER; note = S-phosphorothioate
  modified_base 23: mod_base = OTHER; note = deoxyribose thymine
  modified_base 23..24: mod_base = OTHER; note = S-phosphorothioate
  modified_base 24: mod_base = OTHER; note = deoxyribose uracil (position 3 connectivity)
  modified_base 24..25: mod_base = OTHER; note = S-phosphorothioate
  modified_base 25: mod_base = OTHER; note = deoxyribose inosine
  modified_base 25..26: mod_base = OTHER; note S-N-(1,3-dimethylimidazolidin-2-ylidene)phosphoramidate
  modified_base 26: mod_base = um
  modified_base 27: mod_base = OTHER; note = 2-fluororibose cytosine
  modified_base 27..28: mod_base = OTHER; note = S-phosphorothioate
  modified_base 28: mod_base = gm
  modified_base 28..29: mod_base = OTHER; note = S-phosphorothioate
  modified_base 29: mod_base = OTHER; note = 2-O-methylribose adenine
  modified_base 29..30: mod_base = OTHER; note R-N-(1,3-dimethylimidazolidin-2-ylidene)phosphoramidate
  modified_base 30: mod_base = um
  source 1..30: mol_type = other RNA

SEQ ID NO: 564 - RNA, 30 nt, synthetic construct; identical to SEQ ID NO: 273
  misc_feature 1..30: note = Synthetic: WV-49094
  misc_feature 1..30: note = Synthetic: ADR-0100594
  modified_base 1: mod_base = OTHER; note = 6-aminohexanol linked by phosphate to the 5' end of 2-O-methylribose cytosine
  modified_base 1..2: mod_base = OTHER; note R-N-(1,3-dimethylimidazolidin-2-ylidene)phosphoramidate
  modified_base 2: mod_base = cm
  modified_base 2..3: mod_base = OTHER; note = S-phosphorothioate
  modified_base 3: mod_base = cm
  modified_base 3..4: mod_base = OTHER; note = S-phosphorothioate
  modified_base 4: mod_base = OTHER; note = 2-fluororibose adenine
  modified_base 4..5: mod_base = OTHER; note = S-phosphorothioate
  modified_base 5: mod_base = OTHER; note = 2-fluororibose guanine
  modified_base 5..6: mod_base = OTHER; note = S-phosphorothioate
  modified_base 6: mod_base = OTHER; note = 2-O-methoxyethylribose 5-methyl-cytidine
  modified_base 7: mod_base = OTHER; note = 2-O-methoxyethylribose adenine
  modified_base 8: mod_base = OTHER; note = 2-fluororibose guanine
  modified_base 8..9: mod_base = OTHER; note = S-phosphorothioate
  modified_base 9: mod_base = OTHER; note = 2-fluororibose cytosine
  modified_base 9..10: mod_base = OTHER; note = S-phosphorothioate
  modified_base 10: mod_base = OTHER; note = 2-O-methoxyethylribose thymine
  modified_base 11: mod_base = OTHER; note = 2-fluororibose uracil
  modified_base 11..12: mod_base = OTHER; note R-N-(1,3-dimethylimidazolidin-2-ylidene)phosphoramidate
  modified_base 12: mod_base = cm
  modified_base 13: mod_base = OTHER; note = 2-fluororibose adenine
  modified_base 13..14: mod_base = OTHER; note = S-phosphorothioate
  modified_base 14: mod_base = OTHER; note = 2-fluororibose guanine
  modified_base 14..15: mod_base = OTHER; note R-N-(1,3-dimethylimidazolidin-2-ylidene)phosphoramidate
  modified_base 15: mod_base = OTHER; note = 2-fluororibose uracil
  modified_base 16: mod_base = cm
  modified_base 16..17: mod_base = OTHER; note = S-phosphorothioate
  modified_base 17: mod_base = OTHER; note = 2-fluororibose cytosine
  modified_base 17..18: mod_base = OTHER; note = S-phosphorothioate
  modified_base 18: mod_base = OTHER; note = 2-fluororibose cytosine
  modified_base 18..19: mod_base = OTHER; note = S-phosphorothioate
  modified_base 19: mod_base = OTHER; note = 2-fluororibose uracil
  modified_base 19..20: mod_base = OTHER; note R-N-(1,3-dimethylimidazolidin-2-ylidene)phosphoramidate
  modified_base 20: mod_base = OTHER; note = 2-O-methoxyethylribose thymine
  modified_base 21: mod_base = OTHER; note = 2-O-methoxyethylribose thymine
  modified_base 22: mod_base = OTHER; note = 2-fluororibose cytosine
  modified_base 22..23: mod_base = OTHER; note = S-phosphorothioate
  modified_base 23: mod_base = OTHER; note = deoxyribose thymine
  modified_base 23..24: mod_base = OTHER; note = S-phosphorothioate
  modified_base 24: mod_base = OTHER; note = deoxyribose uracil (position 3 connectivity)
  modified_base 24..25: mod_base = OTHER; note = S-phosphorothioate
  modified_base 25: mod_base = OTHER; note = deoxyribose inosine
  modified_base 25..26: mod_base = OTHER; note S-N-(1,3-dimethylimidazolidin-2-ylidene)phosphoramidate
  modified_base 26: mod_base = um
  modified_base 27: mod_base = OTHER; note = 2-fluororibose cytosine
  modified_base 27..28: mod_base = OTHER; note = S-phosphorothioate
  modified_base 28: mod_base = gm
  modified_base 28..29: mod_base = OTHER; note = S-phosphorothioate
  modified_base 29: mod_base = OTHER; note = 2-O-methylribose adenine
  modified_base 29..30: mod_base = OTHER; note R-N-(1,3-dimethylimidazolidin-2-ylidene)phosphoramidate
  modified_base 30: mod_base = um
  source 1..30: mol_type = other RNA

SEQ ID NO: 565 - RNA, 30 nt, synthetic construct
  misc_feature 1..30: note = Synthetic: WV-49095
  misc_feature 1..30: note = Synthetic: ADR-0104193
  modified_base 1: mod_base = cm
  modified_base 1..2: mod_base = OTHER; note R-N-(1,3-dimethylimidazolidin-2-ylidene)phosphoramidate
  modified_base 2: mod_base = cm
  modified_base 2..3: mod_base = OTHER; note = S-phosphorothioate
  modified_base 3: mod_base = cm
  modified_base 3..4: mod_base = OTHER; note = S-phosphorothioate
  modified_base 4: mod_base = OTHER; note = 2-fluororibose adenine
  modified_base 4..5: mod_base = OTHER; note = S-phosphorothioate
  modified_base 5: mod_base = OTHER; note = 2-fluororibose guanine
  modified_base 5..6: mod_base = OTHER; note = S-phosphorothioate
  modified_base 6: mod_base = cm
  modified_base 7: mod_base = OTHER; note = 2-O-methylribose adenine
  modified_base 7..8: mod_base = OTHER; note = S-phosphorothioate
  modified_base 8: mod_base = OTHER; note = 2-fluororibose guanine
  modified_base 8..9: mod_base = OTHER; note = S-phosphorothioate
  modified_base 9: mod_base = OTHER; note = 2-fluororibose cytosine
  modified_base 10: mod_base = um
  modified_base 10..11: mod_base = OTHER; note = S-phosphorothioate
  modified_base 11: mod_base = OTHER; note = 2-fluororibose uracil
  modified_base 11..12: mod_base = OTHER; note R-N-(1,3-dimethylimidazolidin-2-ylidene)phosphoramidate
  modified_base 12: mod_base = cm
  modified_base 13: mod_base = OTHER; note = 2-fluororibose adenine
  modified_base 13..14: mod_base = OTHER; note = S-phosphorothioate
  modified_base 14: mod_base = OTHER; note = 2-fluororibose guanine
  modified_base 14..15: mod_base = OTHER; note R-N-(1,3-dimethylimidazolidin-2-ylidene)phosphoramidate
  modified_base 15: mod_base = OTHER; note = 2-fluororibose uracil
  modified_base 16: mod_base = cm
  modified_base 16..17: mod_base = OTHER; note = S-phosphorothioate
  modified_base 17: mod_base = OTHER; note = 2-fluororibose cytosine
  modified_base 17..18: mod_base = OTHER; note = S-phosphorothioate
  modified_base 18: mod_base = OTHER; note = 2-fluororibose cytosine
  modified_base 18..19: mod_base = OTHER; note = S-phosphorothioate
  modified_base 19: mod_base = OTHER; note = 2-fluororibose uracil
  modified_base 19..20: mod_base = OTHER; note = S-phosphorothioate
  modified_base 20: mod_base = um
  modified_base 21: mod_base = um
  modified_base 22: mod_base = OTHER; note = 2-fluororibose cytosine
  modified_base 22..23: mod_base = OTHER; note = S-phosphorothioate
  modified_base 23: mod_base = OTHER; note = deoxyribose thymine
  modified_base 23..24: mod_base = OTHER; note = S-phosphorothioate
  modified_base 24: mod_base = OTHER; note = deoxyribose uracil (position 3 connectivity)
  modified_base 24..25: mod_base = OTHER; note = S-phosphorothioate
  modified_base 25: mod_base = OTHER; note = deoxyribose 2-(1H-imidazol-5-yl)-1H-pyrimidin-6-one
  modified_base 25..26: mod_base = OTHER; note S-N-(1,3-dimethylimidazolidin-2-ylidene)phosphoramidate
  modified_base 26: mod_base = um
  modified_base 27: mod_base = OTHER; note = 2-fluororibose cytosine
  modified_base 27..28: mod_base = OTHER; note = S-phosphorothioate
  modified_base 28: mod_base = gm
  modified_base 28..29: mod_base = OTHER; note = S-phosphorothioate
  modified_base 29: mod_base = OTHER; note = 2-O-methylribose adenine
  modified_base 29..30: mod_base = OTHER; note R-N-(1,3-dimethylimidazolidin-2-ylidene)phosphoramidate
  modified_base 30: mod_base = um
  source 1..30: mol_type = other RNA
cccagcagcttcagtccctttcttntcgat

SEQ ID NO: 566 - RNA, 30 nt, synthetic construct
  misc_feature 1..30: note = Synthetic: WV-49096
  misc_feature 1..30: note = Synthetic: ADR-0104206
  modified_base 1: mod_base = cm
  modified_base 1..2: mod_base = OTHER; note R-N-(1,3-dimethylimidazolidin-2-ylidene)phosphoramidate
  modified_base 2: mod_base = cm
  modified_base 2..3: mod_base = OTHER; note = S-phosphorothioate
  modified_base 3: mod_base = cm
  modified_base 3..4: mod_base = OTHER; note = S-phosphorothioate
  modified_base 4: mod_base = OTHER; note = 2-fluororibose adenine
  modified_base 4..5: mod_base = OTHER; note = S-phosphorothioate
  modified_base 5: mod_base = OTHER; note = 2-fluororibose guanine
  modified_base 5..6: mod_base = OTHER; note = S-phosphorothioate
  modified_base 6: mod_base = cm
  modified_base 7: mod_base = OTHER; note = 2-O-methylribose adenine
  modified_base 7..8: mod_base = OTHER; note = S-phosphorothioate
  modified_base 8: mod_base = OTHER; note = 2-fluororibose guanine
  modified_base 8..9: mod_base = OTHER; note = S-phosphorothioate
  modified_base 9: mod_base = OTHER; note = 2-fluororibose cytosine
  modified_base 10: mod_base = um
  modified_base 10..11: mod_base = OTHER; note = S-phosphorothioate
  modified_base 11: mod_base = OTHER; note = 2-fluororibose uracil
  modified_base 11..12: mod_base = OTHER; note R-N-(1,3-dimethylimidazolidin-2-ylidene)phosphoramidate
  modified_base 12: mod_base = cm
  modified_base 13: mod_base = OTHER; note = 2-fluororibose adenine
  modified_base 13..14: mod_base = OTHER; note = S-phosphorothioate
  modified_base 14: mod_base = OTHER; note = 2-fluororibose guanine
  modified_base 14..15: mod_base = OTHER; note R-N-(1,3-dimethylimidazolidin-2-ylidene)phosphoramidate
  modified_base 15: mod_base = OTHER; note = 2-fluororibose uracil
  modified_base 16: mod_base = cm
  modified_base 16..17: mod_base = OTHER; note = S-phosphorothioate
  modified_base 17: mod_base = OTHER; note = 2-fluororibose cytosine
  modified_base 17..18: mod_base = OTHER; note = S-phosphorothioate
  modified_base 18: mod_base = OTHER; note = 2-fluororibose cytosine
  modified_base 18..19: mod_base = OTHER; note = S-phosphorothioate
  modified_base 19: mod_base = OTHER; note = 2-fluororibose uracil
  modified_base 19..20: mod_base = OTHER; note = S-phosphorothioate
  modified_base 20: mod_base = um
  modified_base 21: mod_base = um
  modified_base 22: mod_base = OTHER; note = 2-fluororibose cytosine
  modified_base 22..23: mod_base = OTHER; note = S-phosphorothioate
  modified_base 23: mod_base = OTHER; note = deoxyribose thymine
  modified_base 23..24: mod_base = OTHER; note = S-phosphorothioate
  modified_base 24: mod_base = OTHER; note = deoxyribose 2-(1H-imidazol-5-yl)-1H-pyrimidin-6-one
  modified_base 24..25: mod_base = OTHER; note = S-phosphorothioate
  modified_base 25: mod_base = OTHER; note = deoxyribose inosine
  modified_base 25..26: mod_base = OTHER; note S-N-(1,3-dimethylimidazolidin-2-ylidene)phosphoramidate
  modified_base 26: mod_base = um
  modified_base 27: mod_base = OTHER; note = 2-fluororibose cytosine
  modified_base 27..28: mod_base = OTHER; note = S-phosphorothioate
  modified_base 28: mod_base = gm
  modified_base 28..29: mod_base = OTHER; note = S-phosphorothioate
  modified_base 29: mod_base = OTHER; note = 2-O-methylribose adenine
  modified_base 29..30: mod_base = OTHER; note R-N-(1,3-dimethylimidazolidin-2-ylidene)phosphoramidate
  modified_base 30: mod_base = um
  source 1..30: mol_type = other RNA
cccagcagcttcagtccctttctngtcgat

SEQ ID NO: 567 - RNA, 30 nt, synthetic construct; identical to SEQ ID NO: 273
  misc_feature 1..30: note = Synthetic: WV-44230
  misc_feature 1..30: note = Synthetic: ADR-0103595
  modified_base 1: mod_base = OTHER; note = 2-fluororibose cytosine
  modified_base 1..2: mod_base = OTHER; note R-N-(1,3-dimethylimidazolidin-2-ylidene)phosphoramidate
  modified_base 2: mod_base = OTHER; note = 2-fluororibose cytosine
  modified_base 2..3: mod_base = OTHER; note = S-phosphorothioate
  modified_base 3: mod_base = OTHER; note = 2-fluororibose cytosine
  modified_base 3..4: mod_base = OTHER; note = S-phosphorothioate
  modified_base 4: mod_base = OTHER; note = 2-fluororibose adenine
  modified_base 4..5: mod_base = OTHER; note = S-phosphorothioate
  modified_base 5: mod_base = OTHER; note = 2-fluororibose guanine
  modified_base 5..6: mod_base = OTHER; note = S-phosphorothioate
  modified_base 6: mod_base = OTHER; note = 2-fluororibose cytosine
  modified_base 6..7: mod_base = OTHER; note = S-phosphorothioate
  modified_base 7: mod_base = OTHER; note = 2-fluororibose adenine
  modified_base 7..8: mod_base = OTHER; note = S-phosphorothioate
  modified_base 8: mod_base = OTHER; note = 2-fluororibose guanine
  modified_base 8..9: mod_base = OTHER; note = S-phosphorothioate
  modified_base 9: mod_base = OTHER; note = 2-fluororibose cytosine
  modified_base 9..10: mod_base = OTHER; note = S-phosphorothioate
  modified_base 10: mod_base = OTHER; note = 2-fluororibose uracil
  modified_base 10..11: mod_base = OTHER; note = S-phosphorothioate
  modified_base 11: mod_base = OTHER; note = 2-fluororibose uracil
  modified_base 11..12: mod_base = OTHER; note = S-phosphorothioate
  modified_base 12: mod_base = OTHER; note = 2-fluororibose cytosine
  modified_base 12..13: mod_base = OTHER; note = S-phosphorothioate
  modified_base 13: mod_base = OTHER; note = 2-fluororibose adenine
  modified_base 13..14: mod_base = OTHER; note = S-phosphorothioate
  modified_base 14: mod_base = OTHER; note = 2-fluororibose guanine
  modified_base 14..15: mod_base = OTHER; note = S-phosphorothioate
  modified_base 15: mod_base = OTHER; note = 2-fluororibose uracil
  modified_base 15..16: mod_base = OTHER; note = S-phosphorothioate
  modified_base 16: mod_base = cm
  modified_base 16..17: mod_base = OTHER; note = S-phosphorothioate
  modified_base 17: mod_base = cm
  modified_base 17..18: mod_base = OTHER; note = S-phosphorothioate
  modified_base 18: mod_base = cm
  modified_base 18..19: mod_base = OTHER; note = S-phosphorothioate
  modified_base 19: mod_base = um
  modified_base 19..20: mod_base = OTHER; note = S-phosphorothioate
  modified_base 20: mod_base = um
  modified_base 20..21: mod_base = OTHER; note = S-phosphorothioate
  modified_base 21: mod_base = um
  modified_base 21..22: mod_base = OTHER; note = S-phosphorothioate
  modified_base 22: mod_base = cm
  modified_base 22..23: mod_base = OTHER; note = S-phosphorothioate
  modified_base 23: mod_base = OTHER; note = 2-fluororibose uracil
  modified_base 23..24: mod_base = OTHER; note = S-phosphorothioate
  modified_base 24: mod_base = OTHER; note = alpha-deoxyribose uracil (position 3 connectivity)
  modified_base 24..25: mod_base = OTHER; note = S-phosphorothioate
  modified_base 25: mod_base = OTHER; note = deoxyribose inosine
  modified_base 25..26: mod_base = OTHER; note S-N-(1,3-dimethylimidazolidin-2-ylidene)phosphoramidate
  modified_base 26: mod_base = um
  modified_base 26..27: mod_base = OTHER; note = S-phosphorothioate
  modified_base 27: mod_base = cm
  modified_base 27..28: mod_base = OTHER; note = S-phosphorothioate
  modified_base 28: mod_base = gm
  modified_base 28..29: mod_base = OTHER; note = S-phosphorothioate
  modified_base 29: mod_base = OTHER; note = 2-O-methylribose adenine
  modified_base 29..30: mod_base = OTHER; note R-N-(1,3-dimethylimidazolidin-2-ylidene)phosphoramidate
  modified_base 30: mod_base = um
  source 1..30: mol_type = other RNA

SEQ ID NO: 568 - RNA, 30 nt, synthetic construct; identical to SEQ ID NO: 80
  misc_feature 1..30: note = Synthetic: WV-44231
  misc_feature 1..30: note = Synthetic: ADR-0103634
  modified_base 1: mod_base = OTHER; note = 2-fluororibose cytosine
  modified_base 1..2: mod_base = OTHER; note R-N-(1,3-dimethylimidazolidin-2-ylidene)phosphoramidate
  modified_base 2: mod_base = OTHER; note = 2-fluororibose cytosine
  modified_base 2..3: mod_base = OTHER; note = S-phosphorothioate
  modified_base 3: mod_base = OTHER; note = 2-fluororibose cytosine
  modified_base 3..4: mod_base = OTHER; note = S-phosphorothioate
  modified_base 4: mod_base = OTHER; note = 2-fluororibose adenine
  modified_base 4..5: mod_base = OTHER; note = S-phosphorothioate
  modified_base 5: mod_base = OTHER; note = 2-fluororibose guanine
  modified_base 5..6: mod_base = OTHER; note = S-phosphorothioate
  modified_base 6: mod_base = OTHER; note = 2-fluororibose cytosine
  modified_base 6..7: mod_base = OTHER; note = S-phosphorothioate
  modified_base 7: mod_base = OTHER; note = 2-fluororibose adenine
  modified_base 7..8: mod_base = OTHER; note = S-phosphorothioate
  modified_base 8: mod_base = OTHER; note = 2-fluororibose guanine
  modified_base 8..9: mod_base = OTHER; note = S-phosphorothioate
  modified_base 9: mod_base = OTHER; note = 2-fluororibose cytosine
  modified_base 9..10: mod_base = OTHER; note = S-phosphorothioate
  modified_base 10: mod_base = OTHER; note = 2-fluororibose uracil
  modified_base 10..11: mod_base = OTHER; note = S-phosphorothioate
  modified_base 11: mod_base = OTHER; note = 2-fluororibose uracil
  modified_base 11..12: mod_base = OTHER; note = S-phosphorothioate
  modified_base 12: mod_base = OTHER; note = 2-fluororibose cytosine
  modified_base 12..13: mod_base = OTHER; note = S-phosphorothioate
  modified_base 13: mod_base = OTHER; note = 2-fluororibose adenine
  modified_base 13..14: mod_base = OTHER; note = S-phosphorothioate
  modified_base 14: mod_base = OTHER; note = 2-fluororibose guanine
  modified_base 14..15: mod_base = OTHER; note = S-phosphorothioate
  modified_base 15: mod_base = OTHER; note = 2-fluororibose uracil
  modified_base 15..16: mod_base = OTHER; note = S-phosphorothioate
  modified_base 16: mod_base = cm
  modified_base 16..17: mod_base = OTHER; note = S-phosphorothioate
  modified_base 17: mod_base = cm
  modified_base 17..18: mod_base = OTHER; note = S-phosphorothioate
  modified_base 18: mod_base = cm
  modified_base 18..19: mod_base = OTHER; note = S-phosphorothioate
  modified_base 19: mod_base = um
  modified_base 19..20: mod_base = OTHER; note = S-phosphorothioate
  modified_base 20: mod_base = um
  modified_base 20..21: mod_base = OTHER; note = S-phosphorothioate
  modified_base 21: mod_base = um
  modified_base 21..22: mod_base = OTHER; note = S-phosphorothioate
  modified_base 22: mod_base = cm
  modified_base 22..23: mod_base = OTHER; note = S-phosphorothioate
  modified_base 23: mod_base = OTHER; note = 2-fluororibose uracil
  modified_base 23..24: mod_base = OTHER; note = S-phosphorothioate
  modified_base 24: mod_base = OTHER; note = deoxyribose pseudoisocytidine, 5 connectivity
  modified_base 24..25: mod_base = OTHER; note = S-phosphorothioate
  modified_base 25: mod_base = OTHER; note = deoxyribose inosine
  modified_base 25..26: mod_base = OTHER; note S-N-(1,3-dimethylimidazolidin-2-ylidene)phosphoramidate
  modified_base 26: mod_base = um
  modified_base 26..27: mod_base = OTHER; note = S-phosphorothioate
  modified_base 27: mod_base = cm
  modified_base 27..28: mod_base = OTHER; note = S-phosphorothioate
  modified_base 28: mod_base = gm
  modified_base 28..29: mod_base = OTHER; note = S-phosphorothioate
  modified_base 29: mod_base = OTHER; note = 2-O-methylribose adenine
  modified_base 29..30: mod_base = OTHER; note R-N-(1,3-dimethylimidazolidin-2-ylidene)phosphoramidate
  modified_base 30: mod_base = um
  source 1..30: mol_type = other RNA

SEQ ID NO: 569 - RNA, 29 nt, synthetic construct
  misc_feature 1..29: note = Synthetic: WV-44232
  misc_feature 1..29: note = Synthetic: ADR-0106316
  modified_base 1: mod_base = OTHER; note = 2-fluororibose cytosine
  modified_base 1..2: mod_base = OTHER; note R-N-(1,3-dimethylimidazolidin-2-ylidene)phosphoramidate
  modified_base 2: mod_base = OTHER; note = 2-fluororibose cytosine
  modified_base 2..3: mod_base = OTHER; note = S-phosphorothioate
  modified_base 3: mod_base = OTHER; note = 2-fluororibose cytosine
  modified_base 3..4: mod_base = OTHER; note = S-phosphorothioate
  modified_base 4: mod_base = OTHER; note = 2-fluororibose adenine
  modified_base 4..5: mod_base = OTHER; note = S-phosphorothioate
  modified_base 5: mod_base = OTHER; note = 2-fluororibose guanine
  modified_base 5..6: mod_base = OTHER; note = S-phosphorothioate
  modified_base 6: mod_base = OTHER; note = 2-fluororibose cytosine
  modified_base 6..7: mod_base = OTHER; note = S-phosphorothioate
  modified_base 7: mod_base = OTHER; note = 2-fluororibose adenine
  modified_base 7..8: mod_base = OTHER; note = S-phosphorothioate
  modified_base 8: mod_base = OTHER; note = 2-fluororibose guanine
  modified_base 8..9: mod_base = OTHER; note = S-phosphorothioate
  modified_base 9: mod_base = OTHER; note = 2-fluororibose cytosine
  modified_base 9..10: mod_base = OTHER; note = S-phosphorothioate
  modified_base 10: mod_base = OTHER; note = 2-fluororibose uracil
  modified_base 10..11: mod_base = OTHER; note = S-phosphorothioate
  modified_base 11: mod_base = OTHER; note = 2-fluororibose uracil
  modified_base 11..12: mod_base = OTHER; note = S-phosphorothioate
  modified_base 12: mod_base = OTHER; note = 2-fluororibose cytosine
  modified_base 12..13: mod_base = OTHER; note = S-phosphorothioate
  modified_base 13: mod_base = OTHER; note = 2-fluororibose adenine
  modified_base 13..14: mod_base = OTHER; note = S-phosphorothioate
  modified_base 14: mod_base = OTHER; note = 2-fluororibose guanine
  modified_base 14..15: mod_base = OTHER; note = S-phosphorothioate
  modified_base 15: mod_base = OTHER; note = 2-fluororibose uracil
  modified_base 15..16: mod_base = OTHER; note = S-phosphorothioate
  modified_base 16: mod_base = cm
  modified_base 16..17: mod_base = OTHER; note = S-phosphorothioate
  modified_base 17: mod_base = cm
  modified_base 17..18: mod_base = OTHER; note = S-phosphorothioate
  modified_base 18: mod_base = cm
  modified_base 18..19: mod_base = OTHER; note = S-phosphorothioate
  modified_base 19: mod_base = um
  modified_base 19..20: mod_base = OTHER; note = S-phosphorothioate
  modified_base 20: mod_base = um
  modified_base 20..21: mod_base = OTHER; note = S-phosphorothioate
  modified_base 21: mod_base = um
  modified_base 21..22: mod_base = OTHER; note = S-phosphorothioate
  modified_base 22: mod_base = cm
  modified_base 22..23: mod_base = OTHER; note = S-phosphorothioate
  modified_base 23: mod_base = OTHER; note = 2-fluororibose uracil
  modified_base 23..24: mod_base = OTHER; note = S-phosphorothioate; O,N-Aminomethanylylidene-beta-D-arabinofuranose; S-phosphorothioate
  modified_base 24: mod_base = OTHER; note = deoxyribose inosine
  modified_base 24..25: mod_base = OTHER; note S-N-(1,3-dimethylimidazolidin-2-ylidene)phosphoramidate
  modified_base 25: mod_base = um
  modified_base 25..26: mod_base = OTHER; note = S-phosphorothioate
  modified_base 26: mod_base = cm
  modified_base 26..27: mod_base = OTHER; note = S-phosphorothioate
  modified_base 27: mod_base = gm
  modified_base 27..28: mod_base = OTHER; note = S-phosphorothioate
  modified_base 28: mod_base = OTHER; note = 2-O-methylribose adenine
  modified_base 28..29: mod_base = OTHER; note R-N-(1,3-dimethylimidazolidin-2-ylidene)phosphoramidate
  modified_base 29: mod_base = um
  source 1..29: mol_type = other RNA
cccagcagcttcagtccctttctgtcgat

SEQ ID NO: 570 - RNA, 30 nt, synthetic construct; identical to SEQ ID NO: 80
  misc_feature 1..30: note = Synthetic: WV-44233
  misc_feature 1..30: note = Synthetic: ADR-0103610
  modified_base 1: mod_base = OTHER; note = 2-fluororibose cytosine
  modified_base 1..2: mod_base = OTHER; note R-N-(1,3-dimethylimidazolidin-2-ylidene)phosphoramidate
  modified_base 2: mod_base = OTHER; note = 2-fluororibose cytosine
  modified_base 2..3: mod_base = OTHER; note = S-phosphorothioate
  modified_base 3: mod_base = OTHER; note = 2-fluororibose cytosine
  modified_base 3..4: mod_base = OTHER; note = S-phosphorothioate
  modified_base 4: mod_base = OTHER; note = 2-fluororibose adenine
  modified_base 4..5: mod_base = OTHER; note = S-phosphorothioate
  modified_base 5: mod_base = OTHER; note = 2-fluororibose guanine
  modified_base 5..6: mod_base = OTHER; note = S-phosphorothioate
  modified_base 6: mod_base = OTHER; note = 2-fluororibose cytosine
  modified_base 6..7: mod_base = OTHER; note = S-phosphorothioate
  modified_base 7: mod_base = OTHER; note = 2-fluororibose adenine
  modified_base 7..8: mod_base = OTHER; note = S-phosphorothioate
  modified_base 8: mod_base = OTHER; note = 2-fluororibose guanine
  modified_base 8..9: mod_base = OTHER; note = S-phosphorothioate
  modified_base 9: mod_base = OTHER; note = 2-fluororibose cytosine
  modified_base 9..10: mod_base = OTHER; note = S-phosphorothioate
  modified_base 10: mod_base = OTHER; note = 2-fluororibose uracil
  modified_base 10..11: mod_base = OTHER; note = S-phosphorothioate
  modified_base 11: mod_base = OTHER; note = 2-fluororibose uracil
  modified_base 11..12: mod_base = OTHER; note = S-phosphorothioate
  modified_base 12: mod_base = OTHER; note = 2-fluororibose cytosine
  modified_base 12..13: mod_base = OTHER; note = S-phosphorothioate
  modified_base 13: mod_base = OTHER; note = 2-fluororibose adenine
  modified_base 13..14: mod_base = OTHER; note = S-phosphorothioate
  modified_base 14: mod_base = OTHER; note = 2-fluororibose guanine
  modified_base 14..15: mod_base = OTHER; note = S-phosphorothioate
  modified_base 15: mod_base = OTHER; note = 2-fluororibose uracil
  modified_base 15..16: mod_base = OTHER; note = S-phosphorothioate
  modified_base 16: mod_base = cm
  modified_base 16..17: mod_base = OTHER; note = S-phosphorothioate
  modified_base 17: mod_base = cm
  modified_base 17..18: mod_base = OTHER; note = S-phosphorothioate
  modified_base 18: mod_base = cm
  modified_base 18..19: mod_base = OTHER; note = S-phosphorothioate
  modified_base 19: mod_base = um
  modified_base 19..20: mod_base = OTHER; note = S-phosphorothioate
  modified_base 20: mod_base = um
  modified_base 20..21: mod_base = OTHER; note = S-phosphorothioate
  modified_base 21: mod_base = um
  modified_base 21..22: mod_base = OTHER; note = S-phosphorothioate
  modified_base 22: mod_base = cm
  modified_base 22..23: mod_base = OTHER; note = S-phosphorothioate
  modified_base 23: mod_base = OTHER; note = 2-fluororibose uracil
  modified_base 23..24: mod_base = OTHER; note = S-phosphorothioate
  modified_base 24: mod_base = OTHER; note = deoxyribose 5-methylisocytosine
  modified_base 24..25: mod_base = OTHER; note = phosphorothioate
  modified_base 25: mod_base = OTHER; note = deoxyribose inosine
  modified_base 25..26: mod_base = OTHER; note S-N-(1,3-dimethylimidazolidin-2-ylidene)phosphoramidate
  modified_base 26: mod_base = um
  modified_base 26..27: mod_base = OTHER; note = S-phosphorothioate
  modified_base 27: mod_base = cm
  modified_base 27..28: mod_base = OTHER; note = S-phosphorothioate
  modified_base 28: mod_base = gm
  modified_base 28..29: mod_base = OTHER; note = S-phosphorothioate
  modified_base 29: mod_base = OTHER; note = 2-O-methylribose adenine
  modified_base 29..30: mod_base = OTHER; note R-N-(1,3-dimethylimidazolidin-2-ylidene)phosphoramidate
  modified_base 30: mod_base = um
  source 1..30: mol_type = other RNA

SEQ ID NO: 571 - RNA, 30 nt, synthetic construct; identical to SEQ ID NO: 273
  misc_feature 1..30: note = Synthetic: WV-44234
  misc_feature 1..30: note = Synthetic: ADR-0103609
  modified_base 1: mod_base = OTHER; note = 2-fluororibose cytosine
  modified_base 1..2: mod_base = OTHER; note R-N-(1,3-dimethylimidazolidin-2-ylidene)phosphoramidate
  modified_base 2: mod_base = OTHER; note = 2-fluororibose cytosine
  modified_base 2..3: mod_base = OTHER; note = S-phosphorothioate
  modified_base 3: mod_base = OTHER; note = 2-fluororibose cytosine
  modified_base 3..4: mod_base = OTHER; note = S-phosphorothioate
  modified_base 4: mod_base = OTHER; note = 2-fluororibose adenine
  modified_base 4..5: mod_base = OTHER; note = S-phosphorothioate
  modified_base 5: mod_base = OTHER; note = 2-fluororibose guanine
  modified_base 5..6: mod_base = OTHER; note = S-phosphorothioate
  modified_base 6: mod_base = OTHER; note = 2-fluororibose cytosine
  modified_base 6..7: mod_base = OTHER; note = S-phosphorothioate
  modified_base 7: mod_base = OTHER; note = 2-fluororibose adenine
  modified_base 7..8: mod_base = OTHER; note = S-phosphorothioate
  modified_base 8: mod_base = OTHER; note = 2-fluororibose guanine
  modified_base 8..9: mod_base = OTHER; note = S-phosphorothioate
  modified_base 9: mod_base = OTHER; note = 2-fluororibose cytosine
  modified_base 9..10: mod_base = OTHER; note = S-phosphorothioate
  modified_base 10: mod_base = OTHER; note = 2-fluororibose uracil
  modified_base 10..11: mod_base = OTHER; note = S-phosphorothioate
  modified_base 11: mod_base = OTHER; note = 2-fluororibose uracil
  modified_base 11..12: mod_base = OTHER; note = S-phosphorothioate
  modified_base 12: mod_base = OTHER; note = 2-fluororibose cytosine
  modified_base 12..13: mod_base = OTHER; note = S-phosphorothioate
  modified_base 13: mod_base = OTHER; note = 2-fluororibose adenine
  modified_base 13..14: mod_base = OTHER; note = S-phosphorothioate
  modified_base 14: mod_base = OTHER; note = 2-fluororibose guanine
  modified_base 14..15: mod_base = OTHER; note = S-phosphorothioate
  modified_base 15: mod_base = OTHER; note = 2-fluororibose uracil
  modified_base 15..16: mod_base = OTHER; note = S-phosphorothioate
  modified_base 16: mod_base = cm
  modified_base 16..17: mod_base = OTHER; note = S-phosphorothioate
  modified_base 17: mod_base = cm
  modified_base 17..18: mod_base = OTHER; note = S-phosphorothioate
  modified_base 18: mod_base = cm
  modified_base 18..19: mod_base = OTHER; note = S-phosphorothioate
  modified_base 19: mod_base = um
  modified_base 19..20: mod_base = OTHER; note = S-phosphorothioate
  modified_base 20: mod_base = um
  modified_base 20..21: mod_base = OTHER; note = S-phosphorothioate
  modified_base 21: mod_base = um
  modified_base 21..22: mod_base = OTHER; note = S-phosphorothioate
  modified_base 22: mod_base = cm
  modified_base 22..23: mod_base = OTHER; note = S-phosphorothioate
  modified_base 23: mod_base = OTHER; note = 2-fluororibose uracil
  modified_base 23..24: mod_base = OTHER; note = S-phosphorothioate
  modified_base 24: mod_base = OTHER; note = deoxyribose 3-methyluracil
  modified_base 24..25: mod_base = OTHER; note = S-phosphorothioate
  modified_base 25: mod_base = OTHER; note = deoxyribose inosine
  modified_base 25..26: mod_base = OTHER; note S-N-(1,3-dimethylimidazolidin-2-ylidene)phosphoramidate
  modified_base 26: mod_base = um
  modified_base 26..27: mod_base = OTHER; note = S-phosphorothioate
  modified_base 27: mod_base = cm
  modified_base 27..28: mod_base = OTHER; note = S-phosphorothioate
  modified_base 28: mod_base = gm
  modified_base 28..29: mod_base = OTHER; note = S-phosphorothioate
  modified_base 29: mod_base = OTHER; note = 2-O-methylribose adenine
  modified_base 29..30: mod_base = OTHER; note R-N-(1,3-dimethylimidazolidin-2-ylidene)phosphoramidate
  modified_base 30: mod_base = um
  source 1..30: mol_type = other RNA

SEQ ID NO: 572 - RNA, 30 nt, synthetic construct; identical to SEQ ID NO: 439
  misc_feature 1..30: note = Synthetic: WV-44235
  misc_feature 1..30: note = Synthetic: ADR-0103632
  modified_base 1: mod_base = OTHER; note = 2-fluororibose cytosine
  modified_base 1..2: mod_base = OTHER; note R-N-(1,3-dimethylimidazolidin-2-ylidene)phosphoramidate
  modified_base 2: mod_base = OTHER; note = 2-fluororibose cytosine
  modified_base 2..3: mod_base = OTHER; note = S-phosphorothioate
  modified_base 3: mod_base = OTHER; note = 2-fluororibose cytosine
  modified_base 3..4: mod_base = OTHER; note = S-phosphorothioate
  modified_base 4: mod_base = OTHER; note = 2-fluororibose adenine
  modified_base 4..5: mod_base = OTHER; note = S-phosphorothioate
  modified_base 5: mod_base = OTHER; note = 2-fluororibose guanine
  modified_base 5..6: mod_base = OTHER; note = S-phosphorothioate
  modified_base 6: mod_base = OTHER; note = 2-fluororibose cytosine
  modified_base 6..7: mod_base = OTHER; note = S-phosphorothioate
  modified_base 7: mod_base = OTHER; note = 2-fluororibose adenine
  modified_base 7..8: mod_base = OTHER; note = S-phosphorothioate
  modified_base 8: mod_base = OTHER; note = 2-fluororibose guanine
  modified_base 8..9: mod_base = OTHER; note = S-phosphorothioate
  modified_base 9: mod_base = OTHER; note = 2-fluororibose cytosine
  modified_base 9..10: mod_base = OTHER; note = S-phosphorothioate
  modified_base 10: mod_base = OTHER; note = 2-fluororibose uracil
  modified_base 10..11: mod_base = OTHER; note = S-phosphorothioate
  modified_base 11: mod_base = OTHER; note = 2-fluororibose uracil
  modified_base 11..12: mod_base = OTHER; note = S-phosphorothioate
  modified_base 12: mod_base = OTHER; note = 2-fluororibose cytosine
  modified_base 12..13: mod_base = OTHER; note = S-phosphorothioate
  modified_base 13: mod_base = OTHER; note = 2-fluororibose adenine
  modified_base 13..14: mod_base = OTHER; note = S-phosphorothioate
  modified_base 14: mod_base = OTHER; note = 2-fluororibose guanine
  modified_base 14..15: mod_base = OTHER; note = S-phosphorothioate
  modified_base 15: mod_base = OTHER; note = 2-fluororibose uracil
  modified_base 15..16: mod_base = OTHER; note = S-phosphorothioate
  modified_base 16: mod_base = cm
  modified_base 16..17: mod_base = OTHER; note = S-phosphorothioate
  modified_base 17: mod_base = cm
  modified_base 17..18: mod_base = OTHER; note = S-phosphorothioate
  modified_base 18: mod_base = cm
  modified_base 18..19: mod_base = OTHER; note = S-phosphorothioate
  modified_base 19: mod_base = um
  modified_base 19..20: mod_base = OTHER; note = S-phosphorothioate
  modified_base 20: mod_base = um
  modified_base 20..21: mod_base = OTHER; note = S-phosphorothioate
  modified_base 21: mod_base = um
  modified_base 21..22: mod_base = OTHER; note = S-phosphorothioate
  modified_base 22: mod_base = cm
  modified_base 22..23: mod_base = OTHER; note = S-phosphorothioate
  modified_base 23: mod_base = OTHER; note = 2-fluororibose uracil
  modified_base 23..24: mod_base = OTHER; note = S-phosphorothioate
  modified_base 24: mod_base = OTHER; note = deoxyribose 8-hydroxyguanine
  modified_base 24..25: mod_base = OTHER; note = phosphorothioate
  modified_base 25: mod_base = OTHER; note = deoxyribose inosine
  modified_base 25..26: mod_base = OTHER; note S-N-(1,3-dimethylimidazolidin-2-ylidene)phosphoramidate
  modified_base 26: mod_base = um
  modified_base 26..27: mod_base = OTHER; note = S-phosphorothioate
  modified_base 27: mod_base = cm
  modified_base 27..28: mod_base = OTHER; note = S-phosphorothioate
  modified_base 28: mod_base = gm
  modified_base 28..29: mod_base = OTHER; note = S-phosphorothioate
  modified_base 29: mod_base = OTHER; note = 2-O-methylribose adenine
  modified_base 29..30: mod_base = OTHER; note R-N-(1,3-dimethylimidazolidin-2-ylidene)phosphoramidate
  modified_base 30: mod_base = um
  source 1..30: mol_type = other RNA

SEQ ID NO: 573 - RNA, 30 nt, synthetic construct; identical to SEQ ID NO: 273
  misc_feature 1..30: note = Synthetic: WV-44236
  misc_feature 1..30: note = Synthetic: ADR-0103612
  modified_base 1: mod_base = OTHER; note = 2-fluororibose cytosine
  modified_base 1..2: mod_base = OTHER; note R-N-(1,3-dimethylimidazolidin-2-ylidene)phosphoramidate
  modified_base 2: mod_base = OTHER; note = 2-fluororibose cytosine
  modified_base 2..3: mod_base = OTHER; note = S-phosphorothioate
  modified_base 3: mod_base = OTHER; note = 2-fluororibose cytosine
  modified_base 3..4: mod_base = OTHER; note = S-phosphorothioate
  modified_base 4: mod_base = OTHER; note = 2-fluororibose adenine
  modified_base 4..5: mod_base = OTHER; note = S-phosphorothioate
  modified_base 5: mod_base = OTHER; note = 2-fluororibose guanine
  modified_base 5..6: mod_base = OTHER; note = S-phosphorothioate
  modified_base 6: mod_base = OTHER; note = 2-fluororibose cytosine
  modified_base 6..7: mod_base = OTHER; note = S-phosphorothioate
  modified_base 7: mod_base = OTHER; note = 2-fluororibose adenine
  modified_base 7..8: mod_base = OTHER; note = S-phosphorothioate
  modified_base 8: mod_base = OTHER; note = 2-fluororibose guanine
  modified_base 8..9: mod_base = OTHER; note = S-phosphorothioate
  modified_base 9: mod_base = OTHER; note = 2-fluororibose cytosine
  modified_base 9..10: mod_base = OTHER; note = S-phosphorothioate
  modified_base 10: mod_base = OTHER; note = 2-fluororibose uracil
  modified_base 10..11: mod_base = OTHER; note = S-phosphorothioate
  modified_base 11: mod_base = OTHER; note = 2-fluororibose uracil
  modified_base 11..12: mod_base = OTHER; note = S-phosphorothioate
  modified_base 12: mod_base = OTHER; note = 2-fluororibose cytosine
  modified_base 12..13: mod_base = OTHER; note = S-phosphorothioate
  modified_base 13: mod_base = OTHER; note = 2-fluororibose adenine
  modified_base 13..14: mod_base = OTHER; note = S-phosphorothioate
  modified_base 14: mod_base = OTHER; note = 2-fluororibose guanine
  modified_base 14..15: mod_base = OTHER; note = S-phosphorothioate
  modified_base 15: mod_base = OTHER; note = 2-fluororibose uracil
  modified_base 15..16: mod_base = OTHER; note = S-phosphorothioate
  modified_base 16: mod_base = cm
  modified_base 16..17: mod_base = OTHER; note = S-phosphorothioate
  modified_base 17: mod_base = cm
  modified_base 17..18: mod_base = OTHER; note = S-phosphorothioate
  modified_base 18: mod_base = cm
  modified_base 18..19: mod_base = OTHER; note = S-phosphorothioate
  modified_base 19: mod_base = um
  modified_base 19..20: mod_base = OTHER; note = S-phosphorothioate
  modified_base 20: mod_base = um
  modified_base 20..21: mod_base = OTHER; note = S-phosphorothioate
  modified_base 21: mod_base = um
  modified_base 21..22: mod_base = OTHER; note = S-phosphorothioate
  modified_base 22: mod_base = cm
  modified_base 22..23: mod_base = OTHER; note = S-phosphorothioate
  modified_base 23: mod_base = OTHER; note = 2-fluororibose uracil
  modified_base 23..24: mod_base = OTHER; note = S-phosphorothioate
  modified_base 24: mod_base = OTHER; note = deoxyribose 2-hydroxypyridine
  modified_base 24..25: mod_base = OTHER; note = S-phosphorothioate
  modified_base 25: mod_base = OTHER; note = deoxyribose inosine
  modified_base 25..26: mod_base = OTHER; note S-N-(1,3-dimethylimidazolidin-2-ylidene)phosphoramidate
  modified_base 26: mod_base = um
  modified_base 26..27: mod_base = OTHER; note = S-phosphorothioate
  modified_base 27: mod_base = cm
  modified_base 27..28: mod_base = OTHER; note = S-phosphorothioate
  modified_base 28: mod_base = gm
  modified_base 28..29: mod_base = OTHER; note = S-phosphorothioate
  modified_base 29: mod_base = OTHER; note = 2-O-methylribose adenine
  modified_base 29..30: mod_base = OTHER; note R-N-(1,3-dimethylimidazolidin-2-ylidene)phosphoramidate
  modified_base 30: mod_base = um
  source 1..30: mol_type = other RNA

SEQ ID NO: 574 - RNA, 30 nt, synthetic construct; identical to SEQ ID NO: 80
  misc_feature 1..30: note = Synthetic: WV-44237
  misc_feature 1..30: note = Synthetic: ADR-0103645
  modified_base 1: mod_base = OTHER; note = 2-fluororibose cytosine
  modified_base 1..2: mod_base = OTHER; note R-N-(1,3-dimethylimidazolidin-2-ylidene)phosphoramidate
  modified_base 2: mod_base = OTHER; note = 2-fluororibose cytosine
  modified_base 2..3: mod_base = OTHER; note = S-phosphorothioate
  modified_base 3: mod_base = OTHER; note = 2-fluororibose cytosine
  modified_base 3..4: mod_base = OTHER; note = S-phosphorothioate
  modified_base 4: mod_base = OTHER; note = 2-fluororibose adenine
  modified_base 4..5: mod_base = OTHER; note = S-phosphorothioate
  modified_base 5: mod_base = OTHER; note = 2-fluororibose guanine
  modified_base 5..6: mod_base = OTHER; note = S-phosphorothioate
  modified_base 6: mod_base = OTHER; note = 2-fluororibose cytosine
  modified_base 6..7: mod_base = OTHER; note = S-phosphorothioate
  modified_base 7: mod_base = OTHER; note = 2-fluororibose adenine
  modified_base 7..8: mod_base = OTHER; note = S-phosphorothioate
  modified_base 8: mod_base = OTHER; note = 2-fluororibose guanine
  modified_base 8..9: mod_base = OTHER; note = S-phosphorothioate
  modified_base 9: mod_base = OTHER; note = 2-fluororibose cytosine
  modified_base 9..10: mod_base = OTHER; note = S-phosphorothioate
  modified_base 10: mod_base = OTHER; note = 2-fluororibose uracil
  modified_base 10..11: mod_base = OTHER; note = S-phosphorothioate
  modified_base 11: mod_base = OTHER; note = 2-fluororibose uracil
  modified_base 11..12: mod_base = OTHER; note = S-phosphorothioate
  modified_base 12: mod_base = OTHER; note = 2-fluororibose cytosine
  modified_base 12..13: mod_base = OTHER; note = S-phosphorothioate
  modified_base 13: mod_base = OTHER; note = 2-fluororibose adenine
  modified_base 13..14: mod_base = OTHER; note = S-phosphorothioate
  modified_base 14: mod_base = OTHER; note = 2-fluororibose guanine
  modified_base 14..15: mod_base = OTHER; note = S-phosphorothioate
  modified_base 15: mod_base = OTHER; note = 2-fluororibose uracil
  modified_base 15..16: mod_base = OTHER; note = S-phosphorothioate
  modified_base 16: mod_base = cm
  modified_base 16..17: mod_base = OTHER; note = S-phosphorothioate
  modified_base 17: mod_base = cm
  modified_base 17..18: mod_base = OTHER; note = S-phosphorothioate
  modified_base 18: mod_base = cm
  modified_base 18..19: mod_base = OTHER; note = S-phosphorothioate
  modified_base 19: mod_base = um
  modified_base 19..20: mod_base = OTHER; note = S-phosphorothioate
  modified_base 20: mod_base = um
  modified_base 20..21: mod_base = OTHER; note = S-phosphorothioate
  modified_base 21: mod_base = um
  modified_base 21..22: mod_base = OTHER; note = S-phosphorothioate
  modified_base 22: mod_base = cm
  modified_base 22..23: mod_base = OTHER; note = S-phosphorothioate
  modified_base 23: mod_base = OTHER; note = 2-3-unlocked-ribose uracil
  modified_base 23..24: mod_base = OTHER; note = phosphorothioate
  modified_base 24: mod_base = OTHER; note = deoxyribose cytosine
  modified_base 24..25: mod_base = OTHER; note = S-phosphorothioate
  modified_base 25: mod_base = OTHER; note = deoxyribose inosine
  modified_base 25..26: mod_base = OTHER; note S-N-(1,3-dimethylimidazolidin-2-ylidene)phosphoramidate
  modified_base 26: mod_base = um
  modified_base 26..27: mod_base = OTHER; note = S-phosphorothioate
  modified_base 27: mod_base = cm
  modified_base 27..28: mod_base = OTHER; note = S-phosphorothioate
  modified_base 28: mod_base = gm
  modified_base 28..29: mod_base = OTHER; note = S-phosphorothioate
  modified_base 29: mod_base = OTHER; note = 2-O-methylribose adenine
  modified_base 29..30: mod_base = OTHER; note R-N-(1,3-dimethylimidazolidin-2-ylidene)phosphoramidate
  modified_base 30: mod_base = um
  source 1..30: mol_type = other RNA

SEQ ID NO: 575 - RNA, 30 nt, synthetic construct; identical to SEQ ID NO: 80
  misc_feature 1..30: note = Synthetic: WV-44238
  misc_feature 1..30: note = Synthetic: ADR-0103601
  modified_base 1: mod_base = OTHER; note = 2-fluororibose cytosine
  modified_base 1..2: mod_base = OTHER; note R-N-(1,3-dimethylimidazolidin-2-ylidene)phosphoramidate
  modified_base 2: mod_base = OTHER; note = 2-fluororibose cytosine
  modified_base 2..3: mod_base = OTHER; note = S-phosphorothioate
  modified_base 3: mod_base = OTHER; note = 2-fluororibose cytosine
  modified_base 3..4: mod_base = OTHER; note = S-phosphorothioate
  modified_base 4: mod_base = OTHER; note = 2-fluororibose adenine
  modified_base 4..5: mod_base = OTHER; note = S-phosphorothioate
  modified_base 5: mod_base = OTHER; note = 2-fluororibose guanine
  modified_base 5..6: mod_base = OTHER; note = S-phosphorothioate
  modified_base 6: mod_base = OTHER; note = 2-fluororibose cytosine
  modified_base 6..7: mod_base = OTHER; note = S-phosphorothioate
  modified_base 7: mod_base = OTHER; note = 2-fluororibose adenine
  modified_base 7..8: mod_base = OTHER; note = S-phosphorothioate
  modified_base 8: mod_base = OTHER; note = 2-fluororibose guanine
  modified_base 8..9: mod_base = OTHER; note = S-phosphorothioate
  modified_base 9: mod_base = OTHER; note = 2-fluororibose cytosine
  modified_base 9..10: mod_base = OTHER; note = S-phosphorothioate
  modified_base 10: mod_base = OTHER; note = 2-fluororibose uracil
  modified_base 10..11: mod_base = OTHER; note = S-phosphorothioate
  modified_base 11: mod_base = OTHER; note = 2-fluororibose uracil
  modified_base 11..12: mod_base = OTHER; note = S-phosphorothioate
  modified_base 12: mod_base = OTHER; note = 2-fluororibose cytosine
  modified_base 12..13: mod_base = OTHER; note = S-phosphorothioate
  modified_base 13: mod_base = OTHER; note = 2-fluororibose adenine
  modified_base 13..14: mod_base = OTHER; note = S-phosphorothioate
  modified_base 14: mod_base = OTHER; note = 2-fluororibose guanine
  modified_base 14..15: mod_base = OTHER; note = S-phosphorothioate
  modified_base 15: mod_base = OTHER; note = 2-fluororibose uracil
  modified_base 15..16: mod_base = OTHER; note = S-phosphorothioate
  modified_base 16: mod_base = cm
  modified_base 16..17: mod_base = OTHER; note = S-phosphorothioate
  modified_base 17: mod_base = cm
  modified_base 17..18: mod_base = OTHER; note = S-phosphorothioate
  modified_base 18: mod_base = cm
  modified_base 18..19: mod_base = OTHER; note = S-phosphorothioate
  modified_base 19: mod_base = um
  modified_base 19..20: mod_base = OTHER; note = S-phosphorothioate
  modified_base 20: mod_base = um
  modified_base 20..21: mod_base = OTHER; note = S-phosphorothioate
  modified_base 21: mod_base = um
  modified_base 21..22: mod_base = OTHER; note = S-phosphorothioate
  modified_base 22: mod_base = cm
  modified_base 22..23: mod_base = OTHER; note = S-phosphorothioate
  modified_base 23: mod_base = OTHER; note = 2-fluororibose uracil
  modified_base 23..24: mod_base = OTHER; note = S-phosphorothioate
  modified_base 24: mod_base = OTHER; note = 2-3-unlocked-ribose cytosine
  modified_base 24..25: mod_base = OTHER; note = phosphorothioate
  modified_base 25: mod_base = OTHER; note = deoxyribose inosine
  modified_base 25..26: mod_base = OTHER; note S-N-(1,3-dimethylimidazolidin-2-ylidene)phosphoramidate
  modified_base 26: mod_base = um
  modified_base 26..27: mod_base = OTHER; note = S-phosphorothioate
  modified_base 27: mod_base = cm
  modified_base 27..28: mod_base = OTHER; note = S-phosphorothioate
  modified_base 28: mod_base = gm
  modified_base 28..29: mod_base = OTHER; note = S-phosphorothioate
  modified_base 29: mod_base = OTHER; note = 2-O-methylribose adenine
  modified_base 29..30: mod_base = OTHER; note R-N-(1,3-dimethylimidazolidin-2-ylidene)phosphoramidate
  modified_base 30: mod_base = um
  source 1..30: mol_type = other RNA

SEQ ID NO: 576 - RNA, 30 nt, synthetic construct; identical to SEQ ID NO: 273
  misc_feature 1..30: note = Synthetic: WV-44239
  misc_feature 1..30: note = Synthetic: ADR-0103602
  modified_base 1: mod_base = OTHER; note = 2-fluororibose cytosine
  modified_base 1..2: mod_base = OTHER; note R-N-(1,3-dimethylimidazolidin-2-ylidene)phosphoramidate
  modified_base 2: mod_base = OTHER; note = 2-fluororibose cytosine
  modified_base 2..3: mod_base = OTHER; note = S-phosphorothioate
  modified_base 3: mod_base = OTHER; note = 2-fluororibose cytosine
  modified_base 3..4: mod_base = OTHER; note = S-phosphorothioate
  modified_base 4: mod_base = OTHER; note = 2-fluororibose adenine
  modified_base 4..5: mod_base = OTHER; note = S-phosphorothioate
  modified_base 5: mod_base = OTHER; note = 2-fluororibose guanine
  modified_base 5..6: mod_base = OTHER; note = S-phosphorothioate
  modified_base 6: mod_base = OTHER; note = 2-fluororibose cytosine
  modified_base 6..7: mod_base = OTHER; note = S-phosphorothioate
  modified_base 7: mod_base = OTHER; note = 2-fluororibose adenine
  modified_base 7..8: mod_base = OTHER; note = S-phosphorothioate
  modified_base 8: mod_base = OTHER; note = 2-fluororibose guanine
  modified_base 8..9: mod_base = OTHER; note = S-phosphorothioate
  modified_base 9: mod_base = OTHER; note = 2-fluororibose cytosine
  modified_base 9..10: mod_base = OTHER; note = S-phosphorothioate
  modified_base 10: mod_base = OTHER; note = 2-fluororibose uracil
  modified_base 10..11: mod_base = OTHER; note = S-phosphorothioate
  modified_base 11: mod_base = OTHER; note = 2-fluororibose uracil
  modified_base 11..12: mod_base = OTHER; note = S-phosphorothioate
  modified_base 12: mod_base = OTHER; note = 2-fluororibose cytosine
  modified_base 12..13: mod_base = OTHER; note = S-phosphorothioate
  modified_base 13: mod_base = OTHER; note = 2-fluororibose adenine
  modified_base 13..14: mod_base = OTHER; note = S-phosphorothioate
  modified_base 14: mod_base = OTHER; note = 2-fluororibose guanine
  modified_base 14..15: mod_base = OTHER; note = S-phosphorothioate
  modified_base 15: mod_base = OTHER; note = 2-fluororibose uracil
  modified_base 15..16: mod_base = OTHER; note = S-phosphorothioate
  modified_base 16: mod_base = cm
  modified_base 16..17: mod_base = OTHER; note = S-phosphorothioate
  modified_base 17: mod_base = cm
  modified_base 17..18: mod_base = OTHER; note = S-phosphorothioate
  modified_base 18: mod_base = cm
  modified_base 18..19: mod_base = OTHER; note = S-phosphorothioate
  modified_base 19: mod_base = um
  modified_base 19..20: mod_base = OTHER; note = S-phosphorothioate
  modified_base 20: mod_base = um
  modified_base 20..21: mod_base = OTHER; note = S-phosphorothioate
  modified_base 21: mod_base = um
  modified_base 21..22: mod_base = OTHER; note = S-phosphorothioate
  modified_base 22: mod_base = cm
  modified_base 22..23: mod_base = OTHER; note = S-phosphorothioate
  modified_base 23: mod_base = OTHER; note = 2-fluororibose uracil
  modified_base 23..24: mod_base = OTHER; note = S-phosphorothioate
  modified_base 24: mod_base = OTHER; note = 2-3-unlocked-ribose uracil
  modified_base 24..25: mod_base = OTHER; note = phosphorothioate
  modified_base 25: mod_base = OTHER; note = deoxyribose inosine
  modified_base 25..26: mod_base = OTHER; note S-N-(1,3-dimethylimidazolidin-2-ylidene)phosphoramidate
  modified_base 26: mod_base = um
  modified_base 26..27: mod_base = OTHER; note = S-phosphorothioate
  modified_base 27: mod_base = cm
  modified_base 27..28: mod_base = OTHER; note = S-phosphorothioate
  modified_base 28: mod_base = gm
  modified_base 28..29: mod_base = OTHER; note = S-phosphorothioate
  modified_base 29: mod_base = OTHER; note = 2-O-methylribose adenine
  modified_base 29..30: mod_base = OTHER; note R-N-(1,3-dimethylimidazolidin-2-ylidene)phosphoramidate
  modified_base 30: mod_base = um
  source 1..30: mol_type = other RNA

SEQ ID NO: 577 - RNA, 30 nt, synthetic construct; identical to SEQ ID NO: 80
  misc_feature 1..30: note = Synthetic: WV-44240
  misc_feature 1..30: note = Synthetic: ADR-0103643
  modified_base 1: mod_base = OTHER; note = 2-fluororibose cytosine
  modified_base 1..2: mod_base = OTHER; note R-N-(1,3-dimethylimidazolidin-2-ylidene)phosphoramidate
  modified_base 2: mod_base = OTHER; note = 2-fluororibose cytosine
  modified_base 2..3: mod_base = OTHER; note = S-phosphorothioate
  modified_base 3: mod_base = OTHER; note = 2-fluororibose cytosine
  modified_base 3..4: mod_base = OTHER; note = S-phosphorothioate
  modified_base 4: mod_base = OTHER; note = 2-fluororibose adenine
  modified_base 4..5: mod_base = OTHER; note = S-phosphorothioate
  modified_base 5: mod_base = OTHER; note = 2-fluororibose guanine
  modified_base 5..6: mod_base = OTHER; note = S-phosphorothioate
  modified_base 6: mod_base = OTHER; note = 2-fluororibose cytosine
  modified_base 6..7: mod_base = OTHER; note = S-phosphorothioate
  modified_base 7: mod_base = OTHER; note = 2-fluororibose adenine
  modified_base 7..8: mod_base = OTHER; note = S-phosphorothioate
  modified_base 8: mod_base = OTHER; note = 2-fluororibose guanine
  modified_base 8..9: mod_base = OTHER; note = S-phosphorothioate
  modified_base 9: mod_base = OTHER; note = 2-fluororibose cytosine
  modified_base 9..10: mod_base = OTHER; note = S-phosphorothioate
  modified_base 10: mod_base = OTHER; note = 2-fluororibose uracil
  modified_base 10..11: mod_base = OTHER; note = S-phosphorothioate
  modified_base 11: mod_base = OTHER; note = 2-fluororibose uracil
  modified_base 11..12: mod_base = OTHER; note = S-phosphorothioate
  modified_base 12: mod_base = OTHER; note = 2-fluororibose cytosine
  modified_base 12..13: mod_base = OTHER; note = S-phosphorothioate
  modified_base 13: mod_base = OTHER; note = 2-fluororibose adenine
  modified_base 13..14: mod_base = OTHER; note = S-phosphorothioate
  modified_base 14: mod_base = OTHER; note = 2-fluororibose guanine
  modified_base 14..15: mod_base = OTHER; note = S-phosphorothioate
  modified_base 15: mod_base = OTHER; note = 2-fluororibose uracil
  modified_base 15..16: mod_base = OTHER; note = S-phosphorothioate
  modified_base 16: mod_base = cm
  modified_base 16..17: mod_base = OTHER; note = S-phosphorothioate
  modified_base 17: mod_base = cm
  modified_base 17..18: mod_base = OTHER; note = S-phosphorothioate
  modified_base 18: mod_base = cm
  modified_base 18..19: mod_base = OTHER; note = S-phosphorothioate
  modified_base 19: mod_base = um
  modified_base 19..20: mod_base = OTHER; note = S-phosphorothioate
  modified_base 20: mod_base = um
  modified_base 20..21: mod_base = OTHER; note = S-phosphorothioate
  modified_base 21: mod_base = um
  modified_base 21..22: mod_base = OTHER; note = S-phosphorothioate
  modified_base 22: mod_base = cm
  modified_base 22..23: mod_base = OTHER; note = S-phosphorothioate
  modified_base 23: mod_base = OTHER; note = 2-3-unlocked-ribose uracil
  modified_base 23..24: mod_base = OTHER; note = phosphorothioate
  modified_base 24: mod_base = OTHER; note = 2-3-unlocked-ribose cytosine
  modified_base 24..25: mod_base = OTHER; note = phosphorothioate
  modified_base 25: mod_base = OTHER; note = deoxyribose inosine
  modified_base 25..26: mod_base = OTHER; note S-N-(1,3-dimethylimidazolidin-2-ylidene)phosphoramidate
  modified_base 26: mod_base = um
  modified_base 26..27: mod_base = OTHER; note = S-phosphorothioate
  modified_base 27: mod_base = cm
  modified_base 27..28: mod_base = OTHER; note = S-phosphorothioate
  modified_base 28: mod_base = gm
  modified_base 28..29: mod_base = OTHER; note = S-phosphorothioate
  modified_base 29: mod_base = OTHER; note = 2-O-methylribose adenine
  modified_base 29..30: mod_base = OTHER; note R-N-(1,3-dimethylimidazolidin-2-ylidene)phosphoramidate
  modified_base 30: mod_base = um
  source 1..30: mol_type = other RNA

SEQ ID NO: 578 - RNA, 30 nt, synthetic construct; identical to SEQ ID NO: 273
  misc_feature 1..30: note = Synthetic: WV-44241
  misc_feature 1..30: note = Synthetic: ADR-0103644
  modified_base 1: mod_base = OTHER; note = 2-fluororibose cytosine
  modified_base 1..2: mod_base = OTHER; note R-N-(1,3-dimethylimidazolidin-2-ylidene)phosphoramidate
  modified_base 2: mod_base = OTHER; note = 2-fluororibose cytosine
  modified_base 2..3: mod_base = OTHER; note = S-phosphorothioate
  modified_base 3: mod_base = OTHER; note = 2-fluororibose cytosine
  modified_base 3..4: mod_base = OTHER; note = S-phosphorothioate
  modified_base 4: mod_base = OTHER; note = 2-fluororibose adenine
  modified_base 4..5: mod_base = OTHER; note = S-phosphorothioate
  modified_base 5: mod_base = OTHER; note = 2-fluororibose guanine
  modified_base 5..6: mod_base = OTHER; note = S-phosphorothioate
  modified_base 6: mod_base = OTHER; note = 2-fluororibose cytosine
  modified_base 6..7: mod_base = OTHER; note = S-phosphorothioate
  modified_base 7: mod_base = OTHER; note = 2-fluororibose adenine
  modified_base 7..8: mod_base = OTHER; note = S-phosphorothioate
  modified_base 8: mod_base = OTHER; note = 2-fluororibose guanine
  modified_base 8..9: mod_base = OTHER; note = S-phosphorothioate
  modified_base 9: mod_base = OTHER; note = 2-fluororibose cytosine
  modified_base 9..10: mod_base = OTHER; note = S-phosphorothioate
  modified_base 10: mod_base = OTHER; note = 2-fluororibose uracil
  modified_base 10..11: mod_base = OTHER; note = S-phosphorothioate
  modified_base 11: mod_base = OTHER; note = 2-fluororibose uracil
  modified_base 11..12: mod_base = OTHER; note = S-phosphorothioate
  modified_base 12: mod_base = OTHER; note = 2-fluororibose cytosine
  modified_base 12..13: mod_base = OTHER; note = S-phosphorothioate
  modified_base 13: mod_base = OTHER; note = 2-fluororibose adenine
  modified_base 13..14: mod_base = OTHER; note = S-phosphorothioate
  modified_base 14: mod_base = OTHER; note = 2-fluororibose guanine
  modified_base 14..15: mod_base = OTHER; note = S-phosphorothioate
  modified_base 15: mod_base = OTHER; note = 2-fluororibose uracil
  modified_base 15..16: mod_base = OTHER; note = S-phosphorothioate
  modified_base 16: mod_base = cm
  modified_base 16..17: mod_base = OTHER; note = S-phosphorothioate
  modified_base 17: mod_base = cm
  modified_base 17..18: mod_base = OTHER; note = S-phosphorothioate
  modified_base 18: mod_base = cm
  modified_base 18..19: mod_base = OTHER; note = S-phosphorothioate
  modified_base 19: mod_base = um
  modified_base 19..20: mod_base = OTHER; note = S-phosphorothioate
  modified_base 20: mod_base = um
  modified_base 20..21: mod_base = OTHER; note = S-phosphorothioate
  modified_base 21: mod_base = um
  modified_base 21..22: mod_base = OTHER; note = S-phosphorothioate
  modified_base 22: mod_base = cm
  modified_base 22..23: mod_base = OTHER; note = S-phosphorothioate
  modified_base 23: mod_base = OTHER; note = 2-3-unlocked-ribose uracil
  modified_base 23..24: mod_base = OTHER; note = phosphorothioate
  modified_base 24: mod_base = OTHER; note = 2-3-unlocked-ribose uracil
  modified_base 24..25: mod_base = OTHER; note = phosphorothioate
  modified_base 25: mod_base = OTHER; note = deoxyribose inosine
  modified_base 25..26: mod_base = OTHER; note S-N-(1,3-dimethylimidazolidin-2-ylidene)phosphoramidate
  modified_base 26: mod_base = um
  modified_base 26..27: mod_base = OTHER; note = S-phosphorothioate
  modified_base 27: mod_base = cm
  modified_base 27..28: mod_base = OTHER; note = S-phosphorothioate
  modified_base 28: mod_base = gm
  modified_base 28..29: mod_base = OTHER; note = S-phosphorothioate
  modified_base 29: mod_base = OTHER; note = 2-O-methylribose adenine
  modified_base 29..30: mod_base = OTHER; note R-N-(1,3-dimethylimidazolidin-2-ylidene)phosphoramidate
  modified_base 30: mod_base = um
  source 1..30: mol_type = other RNA

SEQ ID NO: 579 - RNA, 30 nt, synthetic construct; identical to SEQ ID NO: 80
  misc_feature 1..30: note = Synthetic: WV-42934
  misc_feature 1..30: note = Synthetic: ADR-0103597
  modified_base 1: mod_base = OTHER; note = 2-fluororibose cytosine
  modified_base 1..2: mod_base = OTHER; note R-N-(1,3-dimethylimidazolidin-2-ylidene)phosphoramidate
  modified_base 2: mod_base = OTHER; note = 2-fluororibose cytosine
  modified_base 2..3: mod_base = OTHER; note = S-phosphorothioate
  modified_base 3: mod_base = OTHER; note = 2-fluororibose cytosine
  modified_base 3..4: mod_base = OTHER; note = S-phosphorothioate
  modified_base 4: mod_base = OTHER; note = 2-fluororibose adenine
  modified_base 4..5: mod_base = OTHER; note = S-phosphorothioate
  modified_base 5: mod_base = OTHER; note = 2-fluororibose guanine
  modified_base 5..6: mod_base = OTHER; note = S-phosphorothioate
  modified_base 6: mod_base = OTHER; note = 2-fluororibose cytosine
  modified_base 6..7: mod_base = OTHER; note = S-phosphorothioate
  modified_base 7: mod_base = OTHER; note = 2-fluororibose adenine
  modified_base 7..8: mod_base = OTHER; note = S-phosphorothioate
  modified_base 8: mod_base = OTHER; note = 2-fluororibose guanine
  modified_base 8..9: mod_base = OTHER; note = S-phosphorothioate
  modified_base 9: mod_base = OTHER; note = 2-fluororibose cytosine
  modified_base 9..10: mod_base = OTHER; note = S-phosphorothioate
  modified_base 10: mod_base = OTHER; note = 2-fluororibose uracil
  modified_base 10..11: mod_base = OTHER; note = S-phosphorothioate
  modified_base 11: mod_base = OTHER; note = 2-fluororibose uracil
  modified_base 11..12: mod_base = OTHER; note = S-phosphorothioate
  modified_base 12: mod_base = OTHER; note = 2-fluororibose cytosine
  modified_base 12..13: mod_base = OTHER; note = S-phosphorothioate
  modified_base 13: mod_base = OTHER; note = 2-fluororibose adenine
  modified_base 13..14: mod_base = OTHER; note = S-phosphorothioate
  modified_base 14: mod_base = OTHER; note = 2-fluororibose guanine
  modified_base 14..15: mod_base = OTHER; note = S-phosphorothioate
  modified_base 15: mod_base = OTHER; note = 2-fluororibose uracil
  modified_base 15..16: mod_base = OTHER; note = S-phosphorothioate
  modified_base 16: mod_base = cm
  modified_base 16..17: mod_base = OTHER; note = S-phosphorothioate
  modified_base 17: mod_base = cm
  modified_base 17..18: mod_base = OTHER; note = S-phosphorothioate
  modified_base 18: mod_base = cm
  modified_base 18..19: mod_base = OTHER; note = S-phosphorothioate
  modified_base 19: mod_base = um
  modified_base 19..20: mod_base = OTHER; note = S-phosphorothioate
  modified_base 20: mod_base = um
  modified_base 20..21: mod_base = OTHER; note = S-phosphorothioate
  modified_base 21: mod_base = um
  modified_base 21..22: mod_base = OTHER; note = S-phosphorothioate
  modified_base 22: mod_base = cm
  modified_base 22..23: mod_base = OTHER; note = S-phosphorothioate
  modified_base 23: mod_base = OTHER; note = 2-fluororibose uracil
  modified_base 23..24: mod_base = OTHER; note = S-phosphorothioate
  modified_base 24: mod_base = OTHER; note = 2-O-hydroxyethylribose cytosine
  modified_base 24..25: mod_base = OTHER; note = S-phosphorothioate
  modified_base 25: mod_base = OTHER; note = deoxyribose inosine
  modified_base 25..26: mod_base = OTHER; note S-N-(1,3-dimethylimidazolidin-2-ylidene)phosphoramidate
  modified_base 26: mod_base = um
  modified_base 26..27: mod_base = OTHER; note = S-phosphorothioate
  modified_base 27: mod_base = cm
  modified_base 27..28: mod_base = OTHER; note = S-phosphorothioate
  modified_base 28: mod_base = gm
  modified_base 28..29: mod_base = OTHER; note = S-phosphorothioate
  modified_base 29: mod_base = OTHER; note = 2-O-methylribose adenine
  modified_base 29..30: mod_base = OTHER; note R-N-(1,3-dimethylimidazolidin-2-ylidene)phosphoramidate
  modified_base 30: mod_base = um
  source 1..30: mol_type = other RNA

SEQ ID NO: 580 - RNA, 30 nt, synthetic construct; identical to SEQ ID NO: 134
  misc_feature 1..30: note = Synthetic: WV-44242
  misc_feature 1..30: note = Synthetic: ADR-0103646
  modified_base 1: mod_base = OTHER; note = 2-fluororibose cytosine
  modified_base 1..2: mod_base = OTHER; note R-N-(1,3-dimethylimidazolidin-2-ylidene)phosphoramidate
  modified_base 2: mod_base = OTHER; note = 2-fluororibose cytosine
  modified_base 2..3: mod_base = OTHER; note = S-phosphorothioate
  modified_base 3: mod_base = OTHER; note = 2-fluororibose cytosine
  modified_base 3..4: mod_base = OTHER; note = S-phosphorothioate
  modified_base 4: mod_base = OTHER; note = 2-fluororibose adenine
  modified_base 4..5: mod_base = OTHER; note = S-phosphorothioate
  modified_base 5: mod_base = OTHER; note = 2-fluororibose guanine
  modified_base 5..6: mod_base = OTHER; note = S-phosphorothioate
  modified_base 6: mod_base = OTHER; note = 2-fluororibose cytosine
  modified_base 6..7: mod_base = OTHER; note = S-phosphorothioate
  modified_base 7: mod_base = OTHER; note = 2-fluororibose adenine
  modified_base 7..8: mod_base = OTHER; note = S-phosphorothioate
  modified_base 8: mod_base = OTHER; note = 2-fluororibose guanine
  modified_base 8..9: mod_base = OTHER; note = S-phosphorothioate
  modified_base 9: mod_base = OTHER; note = 2-fluororibose cytosine
  modified_base 9..10: mod_base = OTHER; note = S-phosphorothioate
  modified_base 10: mod_base = OTHER; note = 2-fluororibose uracil
  modified_base 10..11: mod_base = OTHER; note = S-phosphorothioate
  modified_base 11: mod_base = OTHER; note = 2-fluororibose uracil
  modified_base 11..12: mod_base = OTHER; note = S-phosphorothioate
  modified_base 12: mod_base = OTHER; note = 2-fluororibose cytosine
  modified_base 12..13: mod_base = OTHER; note = S-phosphorothioate
  modified_base 13: mod_base = OTHER; note = 2-fluororibose adenine
  modified_base 13..14: mod_base = OTHER; note = S-phosphorothioate
  modified_base 14: mod_base = OTHER; note = 2-fluororibose guanine
  modified_base 14..15: mod_base = OTHER; note = S-phosphorothioate
  modified_base 15: mod_base = OTHER; note = 2-fluororibose uracil
  modified_base 15..16: mod_base = OTHER; note = S-phosphorothioate
  modified_base 16: mod_base = cm
  modified_base 16..17: mod_base = OTHER; note = S-phosphorothioate
  modified_base 17: mod_base = cm
  modified_base 17..18: mod_base = OTHER; note = S-phosphorothioate
  modified_base 18: mod_base = cm
  modified_base 18..19: mod_base = OTHER; note = S-phosphorothioate
  modified_base 19: mod_base = um
  modified_base 19..20: mod_base = OTHER; note = S-phosphorothioate
  modified_base 20: mod_base = um
  modified_base 20..21: mod_base = OTHER; note = S-phosphorothioate
  modified_base 21: mod_base = um
  modified_base 21..22: mod_base = OTHER; note = S-phosphorothioate
  modified_base 22: mod_base = cm
  modified_base 22..23: mod_base = OTHER; note = S-phosphorothioate
  modified_base 23: mod_base = OTHER; note = deoxyribose uracil (position 3 connectivity)
  modified_base 23..24: mod_base = OTHER; note = S-phosphorothioate
  modified_base 24: mod_base = OTHER; note = deoxyribose 6-amino-9-substituted 8,9-dihydro-7H-purin-8-one
  modified_base 24..25: mod_base = OTHER; note = S-phosphorothioate
  modified_base 25: mod_base = OTHER; note = deoxyribose inosine
  modified_base 25..26: mod_base = OTHER; note S-N-(1,3-dimethylimidazolidin-2-ylidene)phosphoramidate
  modified_base 26: mod_base = um
  modified_base 26..27: mod_base = OTHER; note = S-phosphorothioate
  modified_base 27: mod_base = cm
  modified_base 27..28: mod_base = OTHER; note = S-phosphorothioate
  modified_base 28: mod_base = gm
  modified_base 28..29: mod_base = OTHER; note = S-phosphorothioate
  modified_base 29: mod_base = OTHER; note = 2-O-methylribose adenine
  modified_base 29..30: mod_base = OTHER; note R-N-(1,3-dimethylimidazolidin-2-ylidene)phosphoramidate
  modified_base 30: mod_base = um
  source 1..30: mol_type = other RNA

SEQ ID NO: 581 - RNA, 30 nt, synthetic construct; identical to SEQ ID NO: 134
  misc_feature 1..30: note = Synthetic: WV-44243
  misc_feature 1..30: note = Synthetic: ADR-0103578
  modified_base 1: mod_base = OTHER; note = 2-fluororibose cytosine
  modified_base 1..2: mod_base = OTHER; note R-N-(1,3-dimethylimidazolidin-2-ylidene)phosphoramidate
  modified_base 2: mod_base = OTHER; note = 2-fluororibose cytosine
  modified_base 2..3: mod_base = OTHER; note = S-phosphorothioate
  modified_base 3: mod_base = OTHER; note = 2-fluororibose cytosine
  modified_base 3..4: mod_base = OTHER; note = S-phosphorothioate
  modified_base 4: mod_base = OTHER; note = 2-fluororibose adenine
  modified_base 4..5: mod_base = OTHER; note = S-phosphorothioate
  modified_base 5: mod_base = OTHER; note = 2-fluororibose guanine
  modified_base 5..6: mod_base = OTHER; note = S-phosphorothioate
  modified_base 6: mod_base = OTHER; note = 2-fluororibose cytosine
  modified_base 6..7: mod_base = OTHER; note = S-phosphorothioate
  modified_base 7: mod_base = OTHER; note = 2-fluororibose adenine
  modified_base 7..8: mod_base = OTHER; note = S-phosphorothioate
  modified_base 8: mod_base = OTHER; note = 2-fluororibose guanine
  modified_base 8..9: mod_base = OTHER; note = S-phosphorothioate
  modified_base 9: mod_base = OTHER; note = 2-fluororibose cytosine
  modified_base 9..10: mod_base = OTHER; note = S-phosphorothioate
  modified_base 10: mod_base = OTHER; note = 2-fluororibose uracil
  modified_base 10..11: mod_base = OTHER; note = S-phosphorothioate
  modified_base 11: mod_base = OTHER; note = 2-fluororibose uracil
  modified_base 11..12: mod_base = OTHER; note = S-phosphorothioate
  modified_base 12: mod_base = OTHER; note = 2-fluororibose cytosine
  modified_base 12..13: mod_base = OTHER; note = S-phosphorothioate
  modified_base 13: mod_base = OTHER; note = 2-fluororibose adenine
  modified_base 13..14: mod_base = OTHER; note = S-phosphorothioate
  modified_base 14: mod_base = OTHER; note = 2-fluororibose guanine
  modified_base 14..15: mod_base = OTHER; note = S-phosphorothioate
  modified_base 15: mod_base = OTHER; note = 2-fluororibose uracil
  modified_base 15..16: mod_base = OTHER; note = S-phosphorothioate
  modified_base 16: mod_base = cm
  modified_base 16..17: mod_base = OTHER; note = S-phosphorothioate
  modified_base 17: mod_base = cm
  modified_base 17..18: mod_base = OTHER; note = S-phosphorothioate
  modified_base 18: mod_base = cm
  modified_base 18..19: mod_base = OTHER; note = S-phosphorothioate
  modified_base 19: mod_base = um
  modified_base 19..20: mod_base = OTHER; note = S-phosphorothioate
  modified_base 20: mod_base = um
  modified_base 20..21: mod_base = OTHER; note = S-phosphorothioate
  modified_base 21: mod_base = um
  modified_base 21..22: mod_base = OTHER; note = S-phosphorothioate
  modified_base 22: mod_base = cm
  modified_base 22..23: mod_base = OTHER; note = S-phosphorothioate
  modified_base 23: mod_base = OTHER; note = alpha-deoxyribose uracil (position 3 connectivity)
  modified_base 23..24: mod_base = OTHER; note = S-phosphorothioate
  modified_base 24: mod_base = OTHER; note = deoxyribose 6-amino-9-substituted 8,9-dihydro-7H-purin-8-one
  modified_base 24..25: mod_base = OTHER; note = S-phosphorothioate
  modified_base 25: mod_base = OTHER; note = deoxyribose inosine
  modified_base 25..26: mod_base = OTHER; note S-N-(1,3-dimethylimidazolidin-2-ylidene)phosphoramidate
  modified_base 26: mod_base = um
  modified_base 26..27: mod_base = OTHER; note = S-phosphorothioate
  modified_base 27: mod_base = cm
  modified_base 27..28: mod_base = OTHER; note = S-phosphorothioate
  modified_base 28: mod_base = gm
  modified_base 28..29: mod_base = OTHER; note = S-phosphorothioate
  modified_base 29: mod_base = OTHER; note = 2-O-methylribose adenine
  modified_base 29..30: mod_base = OTHER; note R-N-(1,3-dimethylimidazolidin-2-ylidene)phosphoramidate
  modified_base 30: mod_base = um
  source 1..30: mol_type = other RNA

SEQ ID NO: 582 - RNA, 30 nt, synthetic construct; identical to SEQ ID NO: 294
  misc_feature 1..30: note = Synthetic: WV-44244
  misc_feature 1..30: note = Synthetic: ADR-0103651
  modified_base 1: mod_base = OTHER; note = 2-fluororibose cytosine
  modified_base 1..2: mod_base = OTHER; note R-N-(1,3-dimethylimidazolidin-2-ylidene)phosphoramidate
  modified_base 2: mod_base = OTHER; note = 2-fluororibose cytosine
  modified_base 2..3: mod_base = OTHER; note = S-phosphorothioate
  modified_base 3: mod_base = OTHER; note = 2-fluororibose cytosine
  modified_base 3..4: mod_base = OTHER; note = S-phosphorothioate
  modified_base 4: mod_base = OTHER; note = 2-fluororibose adenine
  modified_base 4..5: mod_base = OTHER; note = S-phosphorothioate
  modified_base 5: mod_base = OTHER; note = 2-fluororibose guanine
  modified_base 5..6: mod_base = OTHER; note = S-phosphorothioate
  modified_base 6: mod_base = OTHER; note = 2-fluororibose cytosine
  modified_base 6..7: mod_base = OTHER; note = S-phosphorothioate
  modified_base 7: mod_base = OTHER; note = 2-fluororibose adenine
  modified_base 7..8: mod_base = OTHER; note = S-phosphorothioate
  modified_base 8: mod_base = OTHER; note = 2-fluororibose guanine
  modified_base 8..9: mod_base = OTHER; note = S-phosphorothioate
  modified_base 9: mod_base = OTHER; note = 2-fluororibose cytosine
  modified_base 9..10: mod_base = OTHER; note = S-phosphorothioate
  modified_base 10: mod_base = OTHER; note = 2-fluororibose uracil
  modified_base 10..11: mod_base = OTHER; note = S-phosphorothioate
  modified_base 11: mod_base = OTHER; note = 2-fluororibose uracil
  modified_base 11..12: mod_base = OTHER; note = S-phosphorothioate
  modified_base 12: mod_base = OTHER; note = 2-fluororibose cytosine
  modified_base 12..13: mod_base = OTHER; note = S-phosphorothioate
  modified_base 13: mod_base = OTHER; note = 2-fluororibose adenine
  modified_base 13..14: mod_base = OTHER; note = S-phosphorothioate
  modified_base 14: mod_base = OTHER; note = 2-fluororibose guanine
  modified_base 14..15: mod_base = OTHER; note = S-phosphorothioate
  modified_base 15: mod_base = OTHER; note = 2-fluororibose uracil
  modified_base 15..16: mod_base = OTHER; note = S-phosphorothioate
  modified_base 16: mod_base = cm
  modified_base 16..17: mod_base = OTHER; note = S-phosphorothioate
  modified_base 17: mod_base = cm
  modified_base 17..18: mod_base = OTHER; note = S-phosphorothioate
  modified_base 18: mod_base = cm
  modified_base 18..19: mod_base = OTHER; note = S-phosphorothioate
  modified_base 19: mod_base = um
  modified_base 19..20: mod_base = OTHER; note = S-phosphorothioate
  modified_base 20: mod_base = um
  modified_base 20..21: mod_base = OTHER; note = S-phosphorothioate
  modified_base 21: mod_base = um
  modified_base 21..22: mod_base = OTHER; note = S-phosphorothioate
  modified_base 22: mod_base = cm
  modified_base 22..23: mod_base = OTHER; note = S-phosphorothioate
  modified_base 23: mod_base = OTHER; note = deoxyribose pseudoisocytidine, 5 connectivity
  modified_base 23..24: mod_base = OTHER; note = S-phosphorothioate
  modified_base 24: mod_base = OTHER; note = deoxyribose 6-amino-9-substituted 8,9-dihydro-7H-purin-8-one
  modified_base 24..25: mod_base = OTHER; note = S-phosphorothioate
  modified_base 25: mod_base = OTHER; note = deoxyribose inosine
  modified_base 25..26: mod_base = OTHER; note S-N-(1,3-dimethylimidazolidin-2-ylidene)phosphoramidate
  modified_base 26: mod_base = um
  modified_base 26..27: mod_base = OTHER; note = S-phosphorothioate
  modified_base 27: mod_base = cm
  modified_base 27..28: mod_base = OTHER; note = S-phosphorothioate
  modified_base 28: mod_base = gm
  modified_base 28..29: mod_base = OTHER; note = S-phosphorothioate
  modified_base 29: mod_base = OTHER; note = 2-O-methylribose adenine
  modified_base 29..30: mod_base = OTHER; note R-N-(1,3-dimethylimidazolidin-2-ylidene)phosphoramidate
  modified_base 30: mod_base = um
  source 1..30: mol_type = other RNA

SEQ ID NO: 583 - RNA, 30 nt, synthetic construct; identical to SEQ ID NO: 294
  misc_feature 1..30: note = Synthetic: WV-44362
  misc_feature 1..30: note = Synthetic: ADR-0103649
  modified_base 1: mod_base = OTHER; note = 2-fluororibose cytosine
  modified_base 1..2: mod_base = OTHER; note R-N-(1,3-dimethylimidazolidin-2-ylidene)phosphoramidate
  modified_base 2: mod_base = OTHER; note = 2-fluororibose cytosine
  modified_base 2..3: mod_base = OTHER; note = S-phosphorothioate
  modified_base 3: mod_base = OTHER; note = 2-fluororibose cytosine
  modified_base 3..4: mod_base = OTHER; note = S-phosphorothioate
  modified_base 4: mod_base = OTHER; note = 2-fluororibose adenine
  modified_base 4..5: mod_base = OTHER; note = S-phosphorothioate
  modified_base 5: mod_base = OTHER; note = 2-fluororibose guanine
  modified_base 5..6: mod_base = OTHER; note = S-phosphorothioate
  modified_base 6: mod_base = OTHER; note = 2-fluororibose cytosine
  modified_base 6..7: mod_base = OTHER; note = S-phosphorothioate
  modified_base 7: mod_base = OTHER; note = 2-fluororibose adenine
  modified_base 7..8: mod_base = OTHER; note = S-phosphorothioate
  modified_base 8: mod_base = OTHER; note = 2-fluororibose guanine
  modified_base 8..9: mod_base = OTHER; note = S-phosphorothioate
  modified_base 9: mod_base = OTHER; note = 2-fluororibose cytosine
  modified_base 9..10: mod_base = OTHER; note = S-phosphorothioate
  modified_base 10: mod_base = OTHER; note = 2-fluororibose uracil
  modified_base 10..11: mod_base = OTHER; note = S-phosphorothioate
  modified_base 11: mod_base = OTHER; note = 2-fluororibose uracil
  modified_base 11..12: mod_base = OTHER; note = S-phosphorothioate
  modified_base 12: mod_base = OTHER; note = 2-fluororibose cytosine
  modified_base 12..13: mod_base = OTHER; note = S-phosphorothioate
  modified_base 13: mod_base = OTHER; note = 2-fluororibose adenine
  modified_base 13..14: mod_base = OTHER; note = S-phosphorothioate
  modified_base 14: mod_base = OTHER; note = 2-fluororibose guanine
  modified_base 14..15: mod_base = OTHER; note = S-phosphorothioate
  modified_base 15: mod_base = OTHER; note = 2-fluororibose uracil
  modified_base 15..16: mod_base = OTHER; note = S-phosphorothioate
  modified_base 16: mod_base = cm
  modified_base 16..17: mod_base = OTHER; note = S-phosphorothioate
  modified_base 17: mod_base = cm
  modified_base 17..18: mod_base = OTHER; note = S-phosphorothioate
  modified_base 18: mod_base = cm
  modified_base 18..19: mod_base = OTHER; note = S-phosphorothioate
  modified_base 19: mod_base = um
  modified_base 19..20: mod_base = OTHER; note = S-phosphorothioate
  modified_base 20: mod_base = um
  modified_base 20..21: mod_base = OTHER; note = S-phosphorothioate
  modified_base 21: mod_base = um
  modified_base 21..22: mod_base = OTHER; note = S-phosphorothioate
  modified_base 22: mod_base = cm
  modified_base 22..23: mod_base = OTHER; note = S-phosphorothioate
  modified_base 23: mod_base = OTHER; note = deoxyribose 5-methylisocytosine
  modified_base 23..24: mod_base = OTHER; note = phosphorothioate
  modified_base 24: mod_base = OTHER; note = deoxyribose 6-amino-9-substituted 8,9-dihydro-7H-purin-8-one
  modified_base 24..25: mod_base = OTHER; note = S-phosphorothioate
  modified_base 25: mod_base = OTHER; note = deoxyribose inosine
  modified_base 25..26: mod_base = OTHER; note S-N-(1,3-dimethylimidazolidin-2-ylidene)phosphoramidate
  modified_base 26: mod_base = um
  modified_base 26..27: mod_base = OTHER; note = S-phosphorothioate
  modified_base 27: mod_base = cm
  modified_base 27..28: mod_base = OTHER; note = S-phosphorothioate
  modified_base 28: mod_base = gm
  modified_base 28..29: mod_base = OTHER; note = S-phosphorothioate
  modified_base 29: mod_base = OTHER; note = 2-O-methylribose adenine
  modified_base 29..30: mod_base = OTHER; note R-N-(1,3-dimethylimidazolidin-2-ylidene)phosphoramidate
  modified_base 30: mod_base = um
  source 1..30: mol_type = other RNA

SEQ ID NO: 584 - RNA, 30 nt, synthetic construct; identical to SEQ ID NO: 134
  misc_feature 1..30: note = Synthetic: WV-44246
  misc_feature 1..30: note = Synthetic: ADR-0103647
  modified_base 1: mod_base = OTHER; note = 2-fluororibose cytosine
  modified_base 1..2: mod_base = OTHER; note R-N-(1,3-dimethylimidazolidin-2-ylidene)phosphoramidate
  modified_base 2: mod_base = OTHER; note = 2-fluororibose cytosine
  modified_base 2..3: mod_base = OTHER; note = S-phosphorothioate
  modified_base 3: mod_base = OTHER; note = 2-fluororibose cytosine
  modified_base 3..4: mod_base = OTHER; note = S-phosphorothioate
  modified_base 4: mod_base = OTHER; note = 2-fluororibose adenine
  modified_base 4..5: mod_base = OTHER; note = S-phosphorothioate
  modified_base 5: mod_base = OTHER; note = 2-fluororibose guanine
  modified_base 5..6: mod_base = OTHER; note = S-phosphorothioate
  modified_base 6: mod_base = OTHER; note = 2-fluororibose cytosine
  modified_base 6..7: mod_base = OTHER; note = S-phosphorothioate
  modified_base 7: mod_base = OTHER; note = 2-fluororibose adenine
  modified_base 7..8: mod_base = OTHER; note = S-phosphorothioate
  modified_base 8: mod_base = OTHER; note = 2-fluororibose guanine
  modified_base 8..9: mod_base = OTHER; note = S-phosphorothioate
  modified_base 9: mod_base = OTHER; note = 2-fluororibose cytosine
  modified_base 9..10: mod_base = OTHER; note = S-phosphorothioate
  modified_base 10: mod_base = OTHER; note = 2-fluororibose uracil
  modified_base 10..11: mod_base = OTHER; note = S-phosphorothioate
  modified_base 11: mod_base = OTHER; note = 2-fluororibose uracil
  modified_base 11..12: mod_base = OTHER; note = S-phosphorothioate
  modified_base 12: mod_base = OTHER; note = 2-fluororibose cytosine
  modified_base 12..13: mod_base = OTHER; note = S-phosphorothioate
  modified_base 13: mod_base = OTHER; note = 2-fluororibose adenine
  modified_base 13..14: mod_base = OTHER; note = S-phosphorothioate
  modified_base 14: mod_base = OTHER; note = 2-fluororibose guanine
  modified_base 14..15: mod_base = OTHER; note = S-phosphorothioate
  modified_base 15: mod_base = OTHER; note = 2-fluororibose uracil
  modified_base 15..16: mod_base = OTHER; note = S-phosphorothioate
  modified_base 16: mod_base = cm
  modified_base 16..17: mod_base = OTHER; note = S-phosphorothioate
  modified_base 17: mod_base = cm
  modified_base 17..18: mod_base = OTHER; note = S-phosphorothioate
  modified_base 18: mod_base = cm
  modified_base 18..19: mod_base = OTHER; note = S-phosphorothioate
  modified_base 19: mod_base = um
  modified_base 19..20: mod_base = OTHER; note = S-phosphorothioate
  modified_base 20: mod_base = um
  modified_base 20..21: mod_base = OTHER; note = S-phosphorothioate
  modified_base 21: mod_base = um
  modified_base 21..22: mod_base = OTHER; note = S-phosphorothioate
  modified_base 22: mod_base = cm
  modified_base 22..23: mod_base = OTHER; note = S-phosphorothioate
  modified_base 23: mod_base = OTHER; note = deoxyribose 3-methyluracil
  modified_base 23..24: mod_base = OTHER; note = S-phosphorothioate
  modified_base 24: mod_base = OTHER; note = deoxyribose 6-amino-9-substituted 8,9-dihydro-7H-purin-8-one
  modified_base 24..25: mod_base = OTHER; note = S-phosphorothioate
  modified_base 25: mod_base = OTHER; note = deoxyribose inosine
  modified_base 25..26: mod_base = OTHER; note S-N-(1,3-dimethylimidazolidin-2-ylidene)phosphoramidate
  modified_base 26: mod_base = um
  modified_base 26..27: mod_base = OTHER; note = S-phosphorothioate
  modified_base 27: mod_base = cm
  modified_base 27..28: mod_base = OTHER; note = S-phosphorothioate
  modified_base 28: mod_base = gm
  modified_base 28..29: mod_base = OTHER; note = S-phosphorothioate
  modified_base 29: mod_base = OTHER; note = 2-O-methylribose adenine
  modified_base 29..30: mod_base = OTHER; note R-N-(1,3-dimethylimidazolidin-2-ylidene)phosphoramidate
  modified_base 30: mod_base = um
  source 1..30: mol_type = other RNA

SEQ ID NO: 585 - RNA, 30 nt, synthetic construct; identical to SEQ ID NO: 134
  misc_feature 1..30: note = Synthetic: WV-44247
  misc_feature 1..30: note = Synthetic: ADR-0103650
  modified_base 1: mod_base = OTHER; note = 2-fluororibose cytosine
  modified_base 1..2: mod_base = OTHER; note R-N-(1,3-dimethylimidazolidin-2-ylidene)phosphoramidate
  modified_base 2: mod_base = OTHER; note = 2-fluororibose cytosine
  modified_base 2..3: mod_base = OTHER; note = S-phosphorothioate
  modified_base 3: mod_base = OTHER; note = 2-fluororibose cytosine
  modified_base 3..4: mod_base = OTHER; note = S-phosphorothioate
  modified_base 4: mod_base = OTHER; note = 2-fluororibose adenine
  modified_base 4..5: mod_base = OTHER; note = S-phosphorothioate
  modified_base 5: mod_base = OTHER; note = 2-fluororibose guanine
  modified_base 5..6: mod_base = OTHER; note = S-phosphorothioate
  modified_base 6: mod_base = OTHER; note = 2-fluororibose cytosine
  modified_base 6..7: mod_base = OTHER; note = S-phosphorothioate
  modified_base 7: mod_base = OTHER; note = 2-fluororibose adenine
  modified_base 7..8: mod_base = OTHER; note = S-phosphorothioate
  modified_base 8: mod_base = OTHER; note = 2-fluororibose guanine
  modified_base 8..9: mod_base = OTHER; note = S-phosphorothioate
  modified_base 9: mod_base = OTHER; note = 2-fluororibose cytosine
  modified_base 9..10: mod_base = OTHER; note = S-phosphorothioate
  modified_base 10: mod_base = OTHER; note = 2-fluororibose uracil
  modified_base 10..11: mod_base = OTHER; note = S-phosphorothioate
  modified_base 11: mod_base = OTHER; note = 2-fluororibose uracil
  modified_base 11..12: mod_base = OTHER; note = S-phosphorothioate
  modified_base 12: mod_base = OTHER; note = 2-fluororibose cytosine
  modified_base 12..13: mod_base = OTHER; note = S-phosphorothioate
  modified_base 13: mod_base = OTHER; note = 2-fluororibose adenine
  modified_base 13..14: mod_base = OTHER; note = S-phosphorothioate
  modified_base 14: mod_base = OTHER; note = 2-fluororibose guanine
  modified_base 14..15: mod_base = OTHER; note = S-phosphorothioate
  modified_base 15: mod_base = OTHER; note = 2-fluororibose uracil
  modified_base 15..16: mod_base = OTHER; note = S-phosphorothioate
  modified_base 16: mod_base = cm
  modified_base 16..17: mod_base = OTHER; note = S-phosphorothioate
  modified_base 17: mod_base = cm
  modified_base 17..18: mod_base = OTHER; note = S-phosphorothioate
  modified_base 18: mod_base = cm
  modified_base 18..19: mod_base = OTHER; note = S-phosphorothioate
  modified_base 19: mod_base = um
  modified_base 19..20: mod_base = OTHER; note = S-phosphorothioate
  modified_base 20: mod_base = um
  modified_base 20..21: mod_base = OTHER; note = S-phosphorothioate
  modified_base 21: mod_base = um
  modified_base 21..22: mod_base = OTHER; note = S-phosphorothioate
  modified_base 22: mod_base = cm
  modified_base 22..23: mod_base = OTHER; note = S-phosphorothioate
  modified_base 23: mod_base = OTHER; note = deoxyribose 2-hydroxypyridine
  modified_base 23..24: mod_base = OTHER; note = S-phosphorothioate
  modified_base 24: mod_base = OTHER; note = deoxyribose 6-amino-9-substituted 8,9-dihydro-7H-purin-8-one
  modified_base 24..25: mod_base = OTHER; note = S-phosphorothioate
  modified_base 25: mod_base = OTHER; note = deoxyribose inosine
  modified_base 25..26: mod_base = OTHER; note S-N-(1,3-dimethylimidazolidin-2-ylidene)phosphoramidate
  modified_base 26: mod_base = um
  modified_base 26..27: mod_base = OTHER; note = S-phosphorothioate
  modified_base 27: mod_base = cm
  modified_base 27..28: mod_base = OTHER; note = S-phosphorothioate
  modified_base 28: mod_base = gm
  modified_base 28..29: mod_base = OTHER; note = S-phosphorothioate
  modified_base 29: mod_base = OTHER; note = 2-O-methylribose adenine
  modified_base 29..30: mod_base = OTHER; note R-N-(1,3-dimethylimidazolidin-2-ylidene)phosphoramidate
  modified_base 30: mod_base = um
  source 1..30: mol_type = other RNA

SEQ ID NO: 586 - RNA, 30 nt, synthetic construct; identical to SEQ ID NO: 134
  misc_feature 1..30: note = Synthetic: WV-44248
  misc_feature 1..30: note = Synthetic: ADR-0104020
  modified_base 1: mod_base = cm
  modified_base 1..2: mod_base = OTHER; note R-N-(1,3-dimethylimidazolidin-2-ylidene)phosphoramidate
  modified_base 2: mod_base = cm
  modified_base 2..3: mod_base = OTHER; note = S-phosphorothioate
  modified_base 3: mod_base = cm
  modified_base 3..4: mod_base = OTHER; note = S-phosphorothioate
  modified_base 4: mod_base = OTHER; note = 2-fluororibose adenine
  modified_base 4..5: mod_base = OTHER; note = S-phosphorothioate
  modified_base 5: mod_base = OTHER; note = 2-fluororibose guanine
  modified_base 5..6: mod_base = OTHER; note = S-phosphorothioate
  modified_base 6: mod_base = OTHER; note = 2-fluororibose cytosine
  modified_base 6..7: mod_base = OTHER; note = S-phosphorothioate
  modified_base 7: mod_base = OTHER; note = 2-fluororibose adenine
  modified_base 7..8: mod_base = OTHER; note = S-phosphorothioate
  modified_base 8: mod_base = OTHER; note = 2-fluororibose guanine
  modified_base 8..9: mod_base = OTHER; note = S-phosphorothioate
  modified_base 9: mod_base = OTHER; note = 2-fluororibose cytosine
  modified_base 9..10: mod_base = OTHER; note = S-phosphorothioate
  modified_base 10: mod_base = OTHER; note = 2-fluororibose uracil
  modified_base 10..11: mod_base = OTHER; note = S-phosphorothioate
  modified_base 11: mod_base = OTHER; note = 2-fluororibose uracil
  modified_base 11..12: mod_base = OTHER; note = S-phosphorothioate
  modified_base 12: mod_base = OTHER; note = 2-fluororibose cytosine
  modified_base 12..13: mod_base = OTHER; note = S-phosphorothioate
  modified_base 13: mod_base = OTHER; note = 2-fluororibose adenine
  modified_base 13..14: mod_base = OTHER; note = S-phosphorothioate
  modified_base 14: mod_base = OTHER; note = 2-fluororibose guanine
  modified_base 14..15: mod_base = OTHER; note = S-phosphorothioate
  modified_base 15: mod_base = OTHER; note = 2-fluororibose uracil
  modified_base 15..16: mod_base = OTHER; note = S-phosphorothioate
  modified_base 16: mod_base = OTHER; note = 2-fluororibose cytosine
  modified_base 16..17: mod_base = OTHER; note = S-phosphorothioate
  modified_base 17: mod_base = OTHER; note = 2-fluororibose cytosine
  modified_base 17..18: mod_base = OTHER; note = S-phosphorothioate
  modified_base 18: mod_base = OTHER; note = 2-fluororibose cytosine
  modified_base 18..19: mod_base = OTHER; note = S-phosphorothioate
  modified_base 19: mod_base = OTHER; note = 2-fluororibose uracil
  modified_base 19..20: mod_base = OTHER; note = S-phosphorothioate
  modified_base 20: mod_base = OTHER; note = 2-fluororibose uracil
  modified_base 20..21: mod_base = OTHER; note = S-phosphorothioate
  modified_base 21: mod_base = OTHER; note = 2-fluororibose uracil
  modified_base 21..22: mod_base = OTHER; note = S-phosphorothioate
  modified_base 22: mod_base = OTHER; note = 2-fluororibose cytosine
  modified_base 22..23: mod_base = OTHER; note = S-phosphorothioate
  modified_base 23: mod_base = OTHER; note = deoxyribose uracil (position 3 connectivity)
  modified_base 23..24: mod_base = OTHER; note = S-phosphorothioate
  modified_base 24: mod_base = OTHER; note = deoxyribose 6-amino-9-substituted 8,9-dihydro-7H-purin-8-one
  modified_base 24..25: mod_base = OTHER; note = S-phosphorothioate
  modified_base 25: mod_base = OTHER; note = deoxyribose inosine
  modified_base 25..26: mod_base = OTHER; note S-N-(1,3-dimethylimidazolidin-2-ylidene)phosphoramidate
  modified_base 26: mod_base = um
  modified_base 26..27: mod_base = OTHER; note = S-phosphorothioate
  modified_base 27: mod_base = OTHER; note = 2-fluororibose cytosine
  modified_base 27..28: mod_base = OTHER; note = S-phosphorothioate
  modified_base 28: mod_base = gm
  modified_base 28..29: mod_base = OTHER; note = S-phosphorothioate
  modified_base 29: mod_base = OTHER; note = 2-O-methylribose adenine
  modified_base 29..30: mod_base = OTHER; note R-N-(1,3-dimethylimidazolidin-2-ylidene)phosphoramidate
  modified_base 30: mod_base = um
  source 1..30: mol_type = other RNA

SEQ ID NO: 587 - RNA, 30 nt, synthetic construct; identical to SEQ ID NO: 134
  misc_feature 1..30: note = Synthetic: WV-44249
  misc_feature 1..30: note = Synthetic: ADR-0104001
  modified_base 1: mod_base = cm
  modified_base 1..2: mod_base = OTHER; note R-N-(1,3-dimethylimidazolidin-2-ylidene)phosphoramidate
  modified_base 2: mod_base = cm
  modified_base 2..3: mod_base = OTHER; note = S-phosphorothioate
  modified_base 3: mod_base = cm
  modified_base 3..4: mod_base = OTHER; note = S-phosphorothioate
  modified_base 4: mod_base = OTHER; note = 2-fluororibose adenine
  modified_base 4..5: mod_base = OTHER; note = S-phosphorothioate
  modified_base 5: mod_base = OTHER; note = 2-fluororibose guanine
  modified_base 5..6: mod_base = OTHER; note = S-phosphorothioate
  modified_base 6: mod_base = OTHER; note = 2-fluororibose cytosine
  modified_base 6..7: mod_base = OTHER; note = S-phosphorothioate
  modified_base 7: mod_base = OTHER; note = 2-fluororibose adenine
  modified_base 7..8: mod_base = OTHER; note = S-phosphorothioate
  modified_base 8: mod_base = OTHER; note = 2-fluororibose guanine
  modified_base 8..9: mod_base = OTHER; note = S-phosphorothioate
  modified_base 9: mod_base = OTHER; note = 2-fluororibose cytosine
  modified_base 9..10: mod_base = OTHER; note = S-phosphorothioate
  modified_base 10: mod_base = OTHER; note = 2-fluororibose uracil
  modified_base 10..11: mod_base = OTHER; note = S-phosphorothioate
  modified_base 11: mod_base = OTHER; note = 2-fluororibose uracil
  modified_base 11..12: mod_base = OTHER; note = S-phosphorothioate
  modified_base 12: mod_base = OTHER; note = 2-fluororibose cytosine
  modified_base 12..13: mod_base = OTHER; note = S-phosphorothioate
  modified_base 13: mod_base = OTHER; note = 2-fluororibose adenine
  modified_base 13..14: mod_base = OTHER; note = S-phosphorothioate
  modified_base 14: mod_base = OTHER; note = 2-fluororibose guanine
  modified_base 14..15: mod_base = OTHER; note = S-phosphorothioate
  modified_base 15: mod_base = OTHER; note = 2-fluororibose uracil
  modified_base 15..16: mod_base = OTHER; note = S-phosphorothioate
  modified_base 16: mod_base = OTHER; note = 2-fluororibose cytosine
  modified_base 16..17: mod_base = OTHER; note = S-phosphorothioate
  modified_base 17: mod_base = OTHER; note = 2-fluororibose cytosine
  modified_base 17..18: mod_base = OTHER; note = S-phosphorothioate
  modified_base 18: mod_base = OTHER; note = 2-fluororibose cytosine
  modified_base 18..19: mod_base = OTHER; note = S-phosphorothioate
  modified_base 19: mod_base = OTHER; note = 2-fluororibose uracil
  modified_base 19..20: mod_base = OTHER; note = S-phosphorothioate
  modified_base 20: mod_base = OTHER; note = 2-fluororibose uracil
  modified_base 20..21: mod_base = OTHER; note = S-phosphorothioate
  modified_base 21: mod_base = OTHER; note = 2-fluororibose uracil
  modified_base 21..22: mod_base = OTHER; note = S-phosphorothioate
  modified_base 22: mod_base = OTHER; note = 2-fluororibose cytosine
  modified_base 22..23: mod_base = OTHER; note = S-phosphorothioate
  modified_base 23: mod_base = OTHER; note = alpha-deoxyribose uracil (position 3 connectivity)
  modified_base 23..24: mod_base = OTHER; note = S-phosphorothioate
  modified_base 24: mod_base = OTHER; note = deoxyribose 6-amino-9-substituted 8,9-dihydro-7H-purin-8-one
  modified_base 24..25: mod_base = OTHER; note = S-phosphorothioate
  modified_base 25: mod_base = OTHER; note = deoxyribose inosine
  modified_base 25..26: mod_base = OTHER; note S-N-(1,3-dimethylimidazolidin-2-ylidene)phosphoramidate
  modified_base 26: mod_base = um
  modified_base 26..27: mod_base = OTHER; note = S-phosphorothioate
  modified_base 27: mod_base = OTHER; note = 2-fluororibose cytosine
  modified_base 27..28: mod_base = OTHER; note = S-phosphorothioate
  modified_base 28: mod_base = gm
  modified_base 28..29: mod_base = OTHER; note = S-phosphorothioate
  modified_base 29: mod_base = OTHER; note = 2-O-methylribose adenine
  modified_base 29..30: mod_base = OTHER; note R-N-(1,3-dimethylimidazolidin-2-ylidene)phosphoramidate
  modified_base 30: mod_base = um
  source 1..30: mol_type = other RNA

SEQ ID NO: 588 - RNA, 30 nt, synthetic construct; identical to SEQ ID NO: 294
  misc_feature 1..30: note = Synthetic: WV-44250
  misc_feature 1..30: note = Synthetic: ADR-0104025
  modified_base 1: mod_base = cm
  modified_base 1..2: mod_base = OTHER; note R-N-(1,3-dimethylimidazolidin-2-ylidene)phosphoramidate
  modified_base 2: mod_base = cm
  modified_base 2..3: mod_base = OTHER; note = S-phosphorothioate
  modified_base 3: mod_base = cm
  modified_base 3..4: mod_base = OTHER; note = S-phosphorothioate
  modified_base 4: mod_base = OTHER; note = 2-fluororibose adenine
  modified_base 4..5: mod_base = OTHER; note = S-phosphorothioate
  modified_base 5: mod_base = OTHER; note = 2-fluororibose guanine
  modified_base 5..6: mod_base = OTHER; note = S-phosphorothioate
  modified_base 6: mod_base = OTHER; note = 2-fluororibose cytosine
  modified_base 6..7: mod_base = OTHER; note = S-phosphorothioate
  modified_base 7: mod_base = OTHER; note = 2-fluororibose adenine
  modified_base 7..8: mod_base = OTHER; note = S-phosphorothioate
  modified_base 8: mod_base = OTHER; note = 2-fluororibose guanine
  modified_base 8..9: mod_base = OTHER; note = S-phosphorothioate
  modified_base 9: mod_base = OTHER; note = 2-fluororibose cytosine
  modified_base 9..10: mod_base = OTHER; note = S-phosphorothioate
  modified_base 10: mod_base = OTHER; note = 2-fluororibose uracil
  modified_base 10..11: mod_base = OTHER; note = S-phosphorothioate
  modified_base 11: mod_base = OTHER; note = 2-fluororibose uracil
  modified_base 11..12: mod_base = OTHER; note = S-phosphorothioate
  modified_base 12: mod_base = OTHER; note = 2-fluororibose cytosine
  modified_base 12..13: mod_base = OTHER; note = S-phosphorothioate
  modified_base 13: mod_base = OTHER; note = 2-fluororibose adenine
  modified_base 13..14: mod_base = OTHER; note = S-phosphorothioate
  modified_base 14: mod_base = OTHER; note = 2-fluororibose guanine
  modified_base 14..15: mod_base = OTHER; note = S-phosphorothioate
  modified_base 15: mod_base = OTHER; note = 2-fluororibose uracil
  modified_base 15..16: mod_base = OTHER; note = S-phosphorothioate
  modified_base 16: mod_base = OTHER; note = 2-fluororibose cytosine
  modified_base 16..17: mod_base = OTHER; note = S-phosphorothioate
  modified_base 17: mod_base = OTHER; note = 2-fluororibose cytosine
  modified_base 17..18: mod_base = OTHER; note = S-phosphorothioate
  modified_base 18: mod_base = OTHER; note = 2-fluororibose cytosine
  modified_base 18..19: mod_base = OTHER; note = S-phosphorothioate
  modified_base 19: mod_base = OTHER; note = 2-fluororibose uracil
  modified_base 19..20: mod_base = OTHER; note = S-phosphorothioate
  modified_base 20: mod_base = OTHER; note = 2-fluororibose uracil
  modified_base 20..21: mod_base = OTHER; note = S-phosphorothioate
  modified_base 21: mod_base = OTHER; note = 2-fluororibose uracil
  modified_base 21..22: mod_base = OTHER; note = S-phosphorothioate
  modified_base 22: mod_base = OTHER; note = 2-fluororibose cytosine
  modified_base 22..23: mod_base = OTHER; note = S-phosphorothioate
  modified_base 23: mod_base = OTHER; note = deoxyribose pseudoisocytidine, 5 connectivity
  modified_base 23..24: mod_base = OTHER; note = S-phosphorothioate
  modified_base 24: mod_base = OTHER; note = deoxyribose 6-amino-9-substituted 8,9-dihydro-7H-purin-8-one
  modified_base 24..25: mod_base = OTHER; note = S-phosphorothioate
  modified_base 25: mod_base = OTHER; note = deoxyribose inosine
  modified_base 25..26: mod_base = OTHER; note S-N-(1,3-dimethylimidazolidin-2-ylidene)phosphoramidate
  modified_base 26: mod_base = um
  modified_base 26..27: mod_base = OTHER; note = S-phosphorothioate
  modified_base 27: mod_base = OTHER; note = 2-fluororibose cytosine
  modified_base 27..28: mod_base = OTHER; note = S-phosphorothioate
  modified_base 28: mod_base = gm
  modified_base 28..29: mod_base = OTHER; note = S-phosphorothioate
  modified_base 29: mod_base = OTHER; note = 2-O-methylribose adenine
  modified_base 29..30: mod_base = OTHER; note R-N-(1,3-dimethylimidazolidin-2-ylidene)phosphoramidate
  modified_base 30: mod_base = um
  source 1..30: mol_type = other RNA

SEQ ID NO: 589 - RNA, 30 nt, synthetic construct; identical to SEQ ID NO: 294
  misc_feature 1..30: note = Synthetic: WV-44363
  misc_feature 1..30: note = Synthetic: ADR-0104023
  modified_base 1: mod_base = cm
  modified_base 1..2: mod_base = OTHER; note R-N-(1,3-dimethylimidazolidin-2-ylidene)phosphoramidate
  modified_base 2: mod_base = cm
  modified_base 2..3: mod_base = OTHER; note = S-phosphorothioate
  modified_base 3: mod_base = cm
  modified_base 3..4: mod_base = OTHER; note = S-phosphorothioate
  modified_base 4: mod_base = OTHER; note = 2-fluororibose adenine
  modified_base 4..5: mod_base = OTHER; note = S-phosphorothioate
  modified_base 5: mod_base = OTHER; note = 2-fluororibose guanine
  modified_base 5..6: mod_base = OTHER; note = S-phosphorothioate
  modified_base 6: mod_base = OTHER; note = 2-fluororibose cytosine
  modified_base 6..7: mod_base = OTHER; note = S-phosphorothioate
  modified_base 7: mod_base = OTHER; note = 2-fluororibose adenine
  modified_base 7..8: mod_base = OTHER; note = S-phosphorothioate
  modified_base 8: mod_base = OTHER; note = 2-fluororibose guanine
  modified_base 8..9: mod_base = OTHER; note = S-phosphorothioate
  modified_base 9: mod_base = OTHER; note = 2-fluororibose cytosine
  modified_base 9..10: mod_base = OTHER; note = S-phosphorothioate
  modified_base 10: mod_base = OTHER; note = 2-fluororibose uracil
  modified_base 10..11: mod_base = OTHER; note = S-phosphorothioate
  modified_base 11: mod_base = OTHER; note = 2-fluororibose uracil
  modified_base 11..12: mod_base = OTHER; note = S-phosphorothioate
  modified_base 12: mod_base = OTHER; note = 2-fluororibose cytosine
  modified_base 12..13: mod_base = OTHER; note = S-phosphorothioate
  modified_base 13: mod_base = OTHER; note = 2-fluororibose adenine
  modified_base 13..14: mod_base = OTHER; note = S-phosphorothioate
  modified_base 14: mod_base = OTHER; note = 2-fluororibose guanine
  modified_base 14..15: mod_base = OTHER; note = S-phosphorothioate
  modified_base 15: mod_base = OTHER; note = 2-fluororibose uracil
  modified_base 15..16: mod_base = OTHER; note = S-phosphorothioate
  modified_base 16: mod_base = OTHER; note = 2-fluororibose cytosine
  modified_base 16..17: mod_base = OTHER; note = S-phosphorothioate
  modified_base 17: mod_base = OTHER; note = 2-fluororibose cytosine
  modified_base 17..18: mod_base = OTHER; note = S-phosphorothioate
  modified_base 18: mod_base = OTHER; note = 2-fluororibose cytosine
  modified_base 18..19: mod_base = OTHER; note = S-phosphorothioate
  modified_base 19: mod_base = OTHER; note = 2-fluororibose uracil
  modified_base 19..20: mod_base = OTHER; note = S-phosphorothioate
  modified_base 20: mod_base = OTHER; note = 2-fluororibose uracil
  modified_base 20..21: mod_base = OTHER; note = S-phosphorothioate
  modified_base 21: mod_base = OTHER; note = 2-fluororibose uracil
  modified_base 21..22: mod_base = OTHER; note = S-phosphorothioate
  modified_base 22: mod_base = OTHER; note = 2-fluororibose cytosine
  modified_base 22..23: mod_base = OTHER; note = S-phosphorothioate
  modified_base 23: mod_base = OTHER; note = deoxyribose 5-methylisocytosine
  modified_base 23..24: mod_base = OTHER; note = phosphorothioate
  modified_base 24: mod_base = OTHER; note = deoxyribose 6-amino-9-substituted 8,9-dihydro-7H-purin-8-one
  modified_base 24..25: mod_base = OTHER; note = S-phosphorothioate
  modified_base 25: mod_base = OTHER; note = deoxyribose inosine
  modified_base 25..26: mod_base = OTHER; note S-N-(1,3-dimethylimidazolidin-2-ylidene)phosphoramidate
  modified_base 26: mod_base = um
  modified_base 26..27: mod_base = OTHER; note = S-phosphorothioate
  modified_base 27: mod_base = OTHER; note = 2-fluororibose cytosine
  modified_base 27..28: mod_base = OTHER; note = S-phosphorothioate
  modified_base 28: mod_base = gm
  modified_base 28..29: mod_base = OTHER; note = S-phosphorothioate
  modified_base 29: mod_base = OTHER; note = 2-O-methylribose adenine
  modified_base 29..30: mod_base = OTHER; note R-N-(1,3-dimethylimidazolidin-2-ylidene)phosphoramidate
  modified_base 30: mod_base = um
  source 1..30: mol_type = other RNA

SEQ ID NO: 590 - RNA, 30 nt, synthetic construct; identical to SEQ ID NO: 294
  misc_feature 1..30: note = Synthetic: WV-44251
  misc_feature 1..30: note = Synthetic: ADR-0104022
  modified_base 1: mod_base = cm
  modified_base 1..2: mod_base = OTHER; note R-N-(1,3-dimethylimidazolidin-2-ylidene)phosphoramidate
  modified_base 2: mod_base = cm
  modified_base 2..3: mod_base = OTHER; note = S-phosphorothioate
  modified_base 3: mod_base = cm
  modified_base 3..4: mod_base = OTHER; note = S-phosphorothioate
  modified_base 4: mod_base = OTHER; note = 2-fluororibose adenine
  modified_base 4..5: mod_base = OTHER; note = S-phosphorothioate
  modified_base 5: mod_base = OTHER; note = 2-fluororibose guanine
  modified_base 5..6: mod_base = OTHER; note = S-phosphorothioate
  modified_base 6: mod_base = OTHER; note = 2-fluororibose cytosine
  modified_base 6..7: mod_base = OTHER; note = S-phosphorothioate
  modified_base 7: mod_base = OTHER; note = 2-fluororibose adenine
  modified_base 7..8: mod_base = OTHER; note = S-phosphorothioate
  modified_base 8: mod_base = OTHER; note = 2-fluororibose guanine
  modified_base 8..9: mod_base = OTHER; note = S-phosphorothioate
  modified_base 9: mod_base = OTHER; note = 2-fluororibose cytosine
  modified_base 9..10: mod_base = OTHER; note = S-phosphorothioate
  modified_base 10: mod_base = OTHER; note = 2-fluororibose uracil
  modified_base 10..11: mod_base = OTHER; note = S-phosphorothioate
  modified_base 11: mod_base = OTHER; note = 2-fluororibose uracil
  modified_base 11..12: mod_base = OTHER; note = S-phosphorothioate
  modified_base 12: mod_base = OTHER; note = 2-fluororibose cytosine
  modified_base 12..13: mod_base = OTHER; note = S-phosphorothioate
  modified_base 13: mod_base = OTHER; note = 2-fluororibose adenine
  modified_base 13..14: mod_base = OTHER; note = S-phosphorothioate
  modified_base 14: mod_base = OTHER; note = 2-fluororibose guanine
  modified_base 14..15: mod_base = OTHER; note = S-phosphorothioate
  modified_base 15: mod_base = OTHER; note = 2-fluororibose uracil
  modified_base 15..16: mod_base = OTHER; note = S-phosphorothioate
  modified_base 16: mod_base = OTHER; note = 2-fluororibose cytosine
  modified_base 16..17: mod_base = OTHER; note = S-phosphorothioate
  modified_base 17: mod_base = OTHER; note = 2-fluororibose cytosine
  modified_base 17..18: mod_base = OTHER; note = S-phosphorothioate
  modified_base 18: mod_base = OTHER; note = 2-fluororibose cytosine
  modified_base 18..19: mod_base = OTHER; note = S-phosphorothioate
  modified_base 19: mod_base = OTHER; note = 2-fluororibose uracil
  modified_base 19..20: mod_base = OTHER; note = S-phosphorothioate
  modified_base 20: mod_base = OTHER; note = 2-fluororibose uracil
  modified_base 20..21: mod_base = OTHER; note = S-phosphorothioate
  modified_base 21: mod_base = OTHER; note = 2-fluororibose uracil
  modified_base 21..22: mod_base = OTHER; note = S-phosphorothioate
  modified_base 22: mod_base = OTHER; note = 2-fluororibose cytosine
  modified_base 22..23: mod_base = OTHER; note = S-phosphorothioate
  modified_base 23: mod_base = OTHER; note = deoxyribose 5-methylisocytosine
  modified_base 23..24: mod_base = OTHER; note = S-phosphorothioate
  modified_base 24: mod_base = OTHER; note = deoxyribose 6-amino-9-substituted 8,9-dihydro-7H-purin-8-one
  modified_base 24..25: mod_base = OTHER; note = S-phosphorothioate
  modified_base 25: mod_base = OTHER; note = deoxyribose inosine
  modified_base 25..26: mod_base = OTHER; note S-N-(1,3-dimethylimidazolidin-2-ylidene)phosphoramidate
  modified_base 26: mod_base = um
  modified_base 26..27: mod_base = OTHER; note = S-phosphorothioate
  modified_base 27: mod_base = OTHER; note = 2-fluororibose cytosine
  modified_base 27..28: mod_base = OTHER; note = S-phosphorothioate
  modified_base 28: mod_base = gm
  modified_base 28..29: mod_base = OTHER; note = S-phosphorothioate
  modified_base 29: mod_base = OTHER; note = 2-O-methylribose adenine
  modified_base 29..30: mod_base = OTHER; note R-N-(1,3-dimethylimidazolidin-2-ylidene)phosphoramidate
  modified_base 30: mod_base = um
  source 1..30: mol_type = other RNA

SEQ ID NO: 591 - RNA, 30 nt, synthetic construct; identical to SEQ ID NO: 134
  misc_feature 1..30: note = Synthetic: WV-44252
  misc_feature 1..30: note = Synthetic: ADR-0104021
  modified_base 1: mod_base = cm
  modified_base 1..2: mod_base = OTHER; note R-N-(1,3-dimethylimidazolidin-2-ylidene)phosphoramidate
  modified_base 2: mod_base = cm
  modified_base 2..3: mod_base = OTHER; note = S-phosphorothioate
  modified_base 3: mod_base = cm
  modified_base 3..4: mod_base = OTHER; note = S-phosphorothioate
  modified_base 4: mod_base = OTHER; note = 2-fluororibose adenine
  modified_base 4..5: mod_base = OTHER; note = S-phosphorothioate
  modified_base 5: mod_base = OTHER; note = 2-fluororibose guanine
  modified_base 5..6: mod_base = OTHER; note = S-phosphorothioate
  modified_base 6: mod_base = OTHER; note = 2-fluororibose cytosine
  modified_base 6..7: mod_base = OTHER; note = S-phosphorothioate
  modified_base 7: mod_base = OTHER; note = 2-fluororibose adenine
  modified_base 7..8: mod_base = OTHER; note = S-phosphorothioate
  modified_base 8: mod_base = OTHER; note = 2-fluororibose guanine
  modified_base 8..9: mod_base = OTHER; note = S-phosphorothioate
  modified_base 9: mod_base = OTHER; note = 2-fluororibose cytosine
  modified_base 9..10: mod_base = OTHER; note = S-phosphorothioate
  modified_base 10: mod_base = OTHER; note = 2-fluororibose uracil
  modified_base 10..11: mod_base = OTHER; note = S-phosphorothioate
  modified_base 11: mod_base = OTHER; note = 2-fluororibose uracil
  modified_base 11..12: mod_base = OTHER; note = S-phosphorothioate
  modified_base 12: mod_base = OTHER; note = 2-fluororibose cytosine
  modified_base 12..13: mod_base = OTHER; note = S-phosphorothioate
  modified_base 13: mod_base = OTHER; note = 2-fluororibose adenine
  modified_base 13..14: mod_base = OTHER; note = S-phosphorothioate
  modified_base 14: mod_base = OTHER; note = 2-fluororibose guanine
  modified_base 14..15: mod_base = OTHER; note = S-phosphorothioate
  modified_base 15: mod_base = OTHER; note = 2-fluororibose uracil
  modified_base 15..16: mod_base = OTHER; note = S-phosphorothioate
  modified_base 16: mod_base = OTHER; note = 2-fluororibose cytosine
  modified_base 16..17: mod_base = OTHER; note = S-phosphorothioate
  modified_base 17: mod_base = OTHER; note = 2-fluororibose cytosine
  modified_base 17..18: mod_base = OTHER; note = S-phosphorothioate
  modified_base 18: mod_base = OTHER; note = 2-fluororibose cytosine
  modified_base 18..19: mod_base = OTHER; note = S-phosphorothioate
  modified_base 19: mod_base = OTHER; note = 2-fluororibose uracil
  modified_base 19..20: mod_base = OTHER; note = S-phosphorothioate
  modified_base 20: mod_base = OTHER; note = 2-fluororibose uracil
  modified_base 20..21: mod_base = OTHER; note = S-phosphorothioate
  modified_base 21: mod_base = OTHER; note = 2-fluororibose uracil
  modified_base 21..22: mod_base = OTHER; note = S-phosphorothioate
  modified_base 22: mod_base = OTHER; note = 2-fluororibose cytosine
  modified_base 22..23: mod_base = OTHER; note = S-phosphorothioate
  modified_base 23: mod_base = OTHER; note = deoxyribose 3-methyluracil
  modified_base 23..24: mod_base = OTHER; note = S-phosphorothioate
  modified_base 24: mod_base = OTHER; note = deoxyribose 6-amino-9-substituted 8,9-dihydro-7H-purin-8-one
  modified_base 24..25: mod_base = OTHER; note = S-phosphorothioate
  modified_base 25: mod_base = OTHER; note = deoxyribose inosine
  modified_base 25..26: mod_base = OTHER; note S-N-(1,3-dimethylimidazolidin-2-ylidene)phosphoramidate
  modified_base 26: mod_base = um
  modified_base 26..27: mod_base = OTHER; note = S-phosphorothioate
  modified_base 27: mod_base = OTHER; note = 2-fluororibose cytosine
  modified_base 27..28: mod_base = OTHER; note = S-phosphorothioate
  modified_base 28: mod_base = gm
  modified_base 28..29: mod_base = OTHER; note = S-phosphorothioate
  modified_base 29: mod_base = OTHER; note = 2-O-methylribose adenine
  modified_base 29..30: mod_base = OTHER; note R-N-(1,3-dimethylimidazolidin-2-ylidene)phosphoramidate
  modified_base 30: mod_base = um
  source 1..30: mol_type = other RNA

SEQ ID NO: 592 - RNA, 30 nt, synthetic construct; identical to SEQ ID NO: 134
  misc_feature 1..30: note = Synthetic: WV-44253
  misc_feature 1..30: note = Synthetic: ADR-0104024
  modified_base 1: mod_base = cm
  modified_base 1..2: mod_base = OTHER; note R-N-(1,3-dimethylimidazolidin-2-ylidene)phosphoramidate
  modified_base 2: mod_base = cm
  modified_base 2..3: mod_base = OTHER; note = S-phosphorothioate
  modified_base 3: mod_base = cm
  modified_base 3..4: mod_base = OTHER; note = S-phosphorothioate
  modified_base 4: mod_base = OTHER; note = 2-fluororibose adenine
  modified_base 4..5: mod_base = OTHER; note = S-phosphorothioate
  modified_base 5: mod_base = OTHER; note = 2-fluororibose guanine
  modified_base 5..6: mod_base = OTHER; note = S-phosphorothioate
  modified_base 6: mod_base = OTHER; note = 2-fluororibose cytosine
  modified_base 6..7: mod_base = OTHER; note = S-phosphorothioate
  modified_base 7: mod_base = OTHER; note = 2-fluororibose adenine
  modified_base 7..8: mod_base = OTHER; note = S-phosphorothioate
  modified_base 8: mod_base = OTHER; note = 2-fluororibose guanine
  modified_base 8..9: mod_base = OTHER; note = S-phosphorothioate
  modified_base 9: mod_base = OTHER; note = 2-fluororibose cytosine
  modified_base 9..10: mod_base = OTHER; note = S-phosphorothioate
  modified_base 10: mod_base = OTHER; note = 2-fluororibose uracil
  modified_base 10..11: mod_base = OTHER; note = S-phosphorothioate
  modified_base 11: mod_base = OTHER; note = 2-fluororibose uracil
  modified_base 11..12: mod_base = OTHER; note = S-phosphorothioate
  modified_base 12: mod_base = OTHER; note = 2-fluororibose cytosine
  modified_base 12..13: mod_base = OTHER; note = S-phosphorothioate
  modified_base 13: mod_base = OTHER; note = 2-fluororibose adenine
  modified_base 13..14: mod_base = OTHER; note = S-phosphorothioate
  modified_base 14: mod_base = OTHER; note = 2-fluororibose guanine
  modified_base 14..15: mod_base = OTHER; note = S-phosphorothioate
  modified_base 15: mod_base = OTHER; note = 2-fluororibose uracil
  modified_base 15..16: mod_base = OTHER; note = S-phosphorothioate
  modified_base 16: mod_base = OTHER; note = 2-fluororibose cytosine
  modified_base 16..17: mod_base = OTHER; note = S-phosphorothioate
  modified_base 17: mod_base = OTHER; note = 2-fluororibose cytosine
  modified_base 17..18: mod_base = OTHER; note = S-phosphorothioate
  modified_base 18: mod_base = OTHER; note = 2-fluororibose cytosine
  modified_base 18..19: mod_base = OTHER; note = S-phosphorothioate
  modified_base 19: mod_base = OTHER; note = 2-fluororibose uracil
  modified_base 19..20: mod_base = OTHER; note = S-phosphorothioate
  modified_base 20: mod_base = OTHER; note = 2-fluororibose uracil
  modified_base 20..21: mod_base = OTHER; note = S-phosphorothioate
  modified_base 21: mod_base = OTHER; note = 2-fluororibose uracil
  modified_base 21..22: mod_base = OTHER; note = S-phosphorothioate
  modified_base 22: mod_base = OTHER; note = 2-fluororibose cytosine
  modified_base 22..23: mod_base = OTHER; note = S-phosphorothioate
  modified_base 23: mod_base = OTHER; note = deoxyribose 2-hydroxypyridine
  modified_base 23..24: mod_base = OTHER; note = S-phosphorothioate
  modified_base 24: mod_base = OTHER; note = deoxyribose 6-amino-9-substituted 8,9-dihydro-7H-purin-8-one
  modified_base 24..25: mod_base = OTHER; note = S-phosphorothioate
  modified_base 25: mod_base = OTHER; note = deoxyribose inosine
  modified_base 25..26: mod_base = OTHER; note S-N-(1,3-dimethylimidazolidin-2-ylidene)phosphoramidate
  modified_base 26: mod_base = um
  modified_base 26..27: mod_base = OTHER; note = S-phosphorothioate
  modified_base 27: mod_base = OTHER; note = 2-fluororibose cytosine
  modified_base 27..28: mod_base = OTHER; note = S-phosphorothioate
  modified_base 28: mod_base = gm
  modified_base 28..29: mod_base = OTHER; note = S-phosphorothioate
  modified_base 29: mod_base = OTHER; note = 2-O-methylribose adenine
  modified_base 29..30: mod_base = OTHER; note R-N-(1,3-dimethylimidazolidin-2-ylidene)phosphoramidate
  modified_base 30: mod_base = um
  source 1..30: mol_type = other RNA

SEQ ID NO: 593 - RNA, 30 nt, synthetic construct; identical to SEQ ID NO: 134
  misc_feature 1..30: note = Synthetic: WV-44377
  misc_feature 1..30: note = Synthetic: ADR-0104005
  modified_base 1: mod_base = cm
  modified_base 1..2: mod_base = OTHER; note R-N-(1,3-dimethylimidazolidin-2-ylidene)phosphoramidate
  modified_base 2: mod_base = cm
  modified_base 2..3: mod_base = OTHER; note = S-phosphorothioate
  modified_base 3: mod_base = cm
  modified_base 3..4: mod_base = OTHER; note = S-phosphorothioate
  modified_base 4: mod_base = OTHER; note = 2-fluororibose adenine
  modified_base 4..5: mod_base = OTHER; note = S-phosphorothioate
  modified_base 5: mod_base = OTHER; note = 2-fluororibose guanine
  modified_base 5..6: mod_base = OTHER; note = S-phosphorothioate
  modified_base 6: mod_base = OTHER; note = 2-fluororibose cytosine
  modified_base 6..7: mod_base = OTHER; note = S-phosphorothioate
  modified_base 7: mod_base = OTHER; note = 2-fluororibose adenine
  modified_base 7..8: mod_base = OTHER; note = S-phosphorothioate
  modified_base 8: mod_base = OTHER; note = 2-fluororibose guanine
  modified_base 8..9: mod_base = OTHER; note = S-phosphorothioate
  modified_base 9: mod_base = OTHER; note = 2-fluororibose cytosine
  modified_base 9..10: mod_base = OTHER; note = S-phosphorothioate
  modified_base 10: mod_base = OTHER; note = 2-fluororibose uracil
  modified_base 10..11: mod_base = OTHER; note = S-phosphorothioate
  modified_base 11: mod_base = OTHER; note = 2-fluororibose uracil
  modified_base 11..12: mod_base = OTHER; note = S-phosphorothioate
  modified_base 12: mod_base = OTHER; note = 2-fluororibose cytosine
  modified_base 12..13: mod_base = OTHER; note = S-phosphorothioate
  modified_base 13: mod_base = OTHER; note = 2-fluororibose adenine
  modified_base 13..14: mod_base = OTHER; note = S-phosphorothioate
  modified_base 14: mod_base = OTHER; note = 2-fluororibose guanine
  modified_base 14..15: mod_base = OTHER; note = S-phosphorothioate
  modified_base 15: mod_base = OTHER; note = 2-fluororibose uracil
  modified_base 15..16: mod_base = OTHER; note = S-phosphorothioate
  modified_base 16: mod_base = OTHER; note = 2-fluororibose cytosine
  modified_base 16..17: mod_base = OTHER; note = S-phosphorothioate
  modified_base 17: mod_base = OTHER; note = 2-fluororibose cytosine
  modified_base 17..18: mod_base = OTHER; note = S-phosphorothioate
  modified_base 18: mod_base = OTHER; note = 2-fluororibose cytosine
  modified_base 18..19: mod_base = OTHER; note = S-phosphorothioate
  modified_base 19: mod_base = OTHER; note = 2-fluororibose uracil
  modified_base 19..20: mod_base = OTHER; note = S-phosphorothioate
  modified_base 20: mod_base = OTHER; note = 2-fluororibose uracil
  modified_base 20..21: mod_base = OTHER; note = S-phosphorothioate
  modified_base 21: mod_base = OTHER; note = 2-fluororibose uracil
  modified_base 21..22: mod_base = OTHER; note = S-phosphorothioate
  modified_base 22: mod_base = OTHER; note = 2-fluororibose cytosine
  modified_base 22..23: mod_base = OTHER; note = S-phosphorothioate
  modified_base 23: mod_base = OTHER; note = S-propanetriol thymine
  modified_base 23..24: mod_base = OTHER; note = S-phosphorothioate
  modified_base 24: mod_base = OTHER; note = deoxyribose 6-amino-9-substituted 8,9-dihydro-7H-purin-8-one
  modified_base 24..25: mod_base = OTHER; note = S-phosphorothioate
  modified_base 25: mod_base = OTHER; note = deoxyribose inosine
  modified_base 25..26: mod_base = OTHER; note S-N-(1,3-dimethylimidazolidin-2-ylidene)phosphoramidate
  modified_base 26: mod_base = um
  modified_base 26..27: mod_base = OTHER; note = S-phosphorothioate
  modified_base 27: mod_base = OTHER; note = 2-fluororibose cytosine
  modified_base 27..28: mod_base = OTHER; note = S-phosphorothioate
  modified_base 28: mod_base = gm
  modified_base 28..29: mod_base = OTHER; note = S-phosphorothioate
  modified_base 29: mod_base = OTHER; note = 2-O-methylribose adenine
  modified_base 29..30: mod_base = OTHER; note R-N-(1,3-dimethylimidazolidin-2-ylidene)phosphoramidate
  modified_base 30: mod_base = um
  source 1..30: mol_type = other RNA

SEQ ID NO: 594 - RNA, 30 nt, synthetic construct; identical to SEQ ID NO: 80
  misc_feature 1..30: note = Synthetic: WV-44378
  misc_feature 1..30: note = Synthetic: ADR-0104008
  modified_base 1: mod_base = cm
  modified_base 1..2: mod_base = OTHER; note R-N-(1,3-dimethylimidazolidin-2-ylidene)phosphoramidate
  modified_base 2: mod_base = cm
  modified_base 2..3: mod_base = OTHER; note = S-phosphorothioate
  modified_base 3: mod_base = cm
  modified_base 3..4: mod_base = OTHER; note = S-phosphorothioate
  modified_base 4: mod_base = OTHER; note = 2-fluororibose adenine
  modified_base 4..5: mod_base = OTHER; note = S-phosphorothioate
  modified_base 5: mod_base = OTHER; note = 2-fluororibose guanine
  modified_base 5..6: mod_base = OTHER; note = S-phosphorothioate
  modified_base 6: mod_base = OTHER; note = 2-fluororibose cytosine
  modified_base 6..7: mod_base = OTHER; note = S-phosphorothioate
  modified_base 7: mod_base = OTHER; note = 2-fluororibose adenine
  modified_base 7..8: mod_base = OTHER; note = S-phosphorothioate
  modified_base 8: mod_base = OTHER; note = 2-fluororibose guanine
  modified_base 8..9: mod_base = OTHER; note = S-phosphorothioate
  modified_base 9: mod_base = OTHER; note = 2-fluororibose cytosine
  modified_base 9..10: mod_base = OTHER; note = S-phosphorothioate
  modified_base 10: mod_base = OTHER; note = 2-fluororibose uracil
  modified_base 10..11: mod_base = OTHER; note = S-phosphorothioate
  modified_base 11: mod_base = OTHER; note = 2-fluororibose uracil
  modified_base 11..12: mod_base = OTHER; note = S-phosphorothioate
  modified_base 12: mod_base = OTHER; note = 2-fluororibose cytosine
  modified_base 12..13: mod_base = OTHER; note = S-phosphorothioate
  modified_base 13: mod_base = OTHER; note = 2-fluororibose adenine
  modified_base 13..14: mod_base = OTHER; note = S-phosphorothioate
  modified_base 14: mod_base = OTHER; note = 2-fluororibose guanine
  modified_base 14..15: mod_base = OTHER; note = S-phosphorothioate
  modified_base 15: mod_base = OTHER; note = 2-fluororibose uracil
  modified_base 15..16: mod_base = OTHER; note = S-phosphorothioate
  modified_base 16: mod_base = OTHER; note = 2-fluororibose cytosine
  modified_base 16..17: mod_base = OTHER; note = S-phosphorothioate
  modified_base 17: mod_base = OTHER; note = 2-fluororibose cytosine
  modified_base 17..18: mod_base = OTHER; note = S-phosphorothioate
  modified_base 18: mod_base = OTHER; note = 2-fluororibose cytosine
  modified_base 18..19: mod_base = OTHER; note = S-phosphorothioate
  modified_base 19: mod_base = OTHER; note = 2-fluororibose uracil
  modified_base 19..20: mod_base = OTHER; note = S-phosphorothioate
  modified_base 20: mod_base = OTHER; note = 2-fluororibose uracil
  modified_base 20..21: mod_base = OTHER; note = S-phosphorothioate
  modified_base 21: mod_base = OTHER; note = 2-fluororibose uracil
  modified_base 21..22: mod_base = OTHER; note = S-phosphorothioate
  modified_base 22: mod_base = OTHER; note = 2-fluororibose cytosine
  modified_base 22..23: mod_base = OTHER; note = S-phosphorothioate
  modified_base 23: mod_base = OTHER; note = 2-fluororibose uracil
  modified_base 23..24: mod_base = OTHER; note = S-phosphorothioate
  modified_base 24: mod_base = OTHER; note = S-propanetriol cytosine
  modified_base 24..25: mod_base = OTHER; note = S-phosphorothioate
  modified_base 25: mod_base = OTHER; note = deoxyribose inosine
  modified_base 25..26: mod_base = OTHER; note S-N-(1,3-dimethylimidazolidin-2-ylidene)phosphoramidate
  modified_base 26: mod_base = um
  modified_base 26..27: mod_base = OTHER; note = S-phosphorothioate
  modified_base 27: mod_base = OTHER; note = 2-fluororibose cytosine
  modified_base 27..28: mod_base = OTHER; note = S-phosphorothioate
  modified_base 28: mod_base = gm
  modified_base 28..29: mod_base = OTHER; note = S-phosphorothioate
  modified_base 29: mod_base = OTHER; note = 2-O-methylribose adenine
  modified_base 29..30: mod_base = OTHER; note R-N-(1,3-dimethylimidazolidin-2-ylidene)phosphoramidate
  modified_base 30: mod_base = um
  source 1..30: mol_type = other RNA

SEQ ID NO: 595 - RNA, 30 nt, synthetic construct; identical to SEQ ID NO: 134
  misc_feature 1..30: note = Synthetic: WV-44379
  misc_feature 1..30: note = Synthetic: ADR-0104014
  modified_base 1: mod_base = cm
  modified_base 1..2: mod_base = OTHER; note R-N-(1,3-dimethylimidazolidin-2-ylidene)phosphoramidate
  modified_base 2: mod_base = cm
  modified_base 2..3: mod_base = OTHER; note = S-phosphorothioate
  modified_base 3: mod_base = cm
  modified_base 3..4: mod_base = OTHER; note = S-phosphorothioate
  modified_base 4: mod_base = OTHER; note = 2-fluororibose adenine
  modified_base 4..5: mod_base = OTHER; note = S-phosphorothioate
  modified_base 5: mod_base = OTHER; note = 2-fluororibose guanine
  modified_base 5..6: mod_base = OTHER; note = S-phosphorothioate
  modified_base 6: mod_base = OTHER; note = 2-fluororibose cytosine
  modified_base 6..7: mod_base = OTHER; note = S-phosphorothioate
  modified_base 7: mod_base = OTHER; note = 2-fluororibose adenine
  modified_base 7..8: mod_base = OTHER; note = S-phosphorothioate
  modified_base 8: mod_base = OTHER; note = 2-fluororibose guanine
  modified_base 8..9: mod_base = OTHER; note = S-phosphorothioate
  modified_base 9: mod_base = OTHER; note = 2-fluororibose cytosine
  modified_base 9..10: mod_base = OTHER; note = S-phosphorothioate
  modified_base 10: mod_base = OTHER; note = 2-fluororibose uracil
  modified_base 10..11: mod_base = OTHER; note = S-phosphorothioate
  modified_base 11: mod_base = OTHER; note = 2-fluororibose uracil
  modified_base 11..12: mod_base = OTHER; note = S-phosphorothioate
  modified_base 12: mod_base = OTHER; note = 2-fluororibose cytosine
  modified_base 12..13: mod_base = OTHER; note = S-phosphorothioate
  modified_base 13: mod_base = OTHER; note = 2-fluororibose adenine
  modified_base 13..14: mod_base = OTHER; note = S-phosphorothioate
  modified_base 14: mod_base = OTHER; note = 2-fluororibose guanine
  modified_base 14..15: mod_base = OTHER; note = S-phosphorothioate
  modified_base 15: mod_base = OTHER; note = 2-fluororibose uracil
  modified_base 15..16: mod_base = OTHER; note = S-phosphorothioate
  modified_base 16: mod_base = OTHER; note = 2-fluororibose cytosine
  modified_base 16..17: mod_base = OTHER; note = S-phosphorothioate
  modified_base 17: mod_base = OTHER; note = 2-fluororibose cytosine
  modified_base 17..18: mod_base = OTHER; note = S-phosphorothioate
  modified_base 18: mod_base = OTHER; note = 2-fluororibose cytosine
  modified_base 18..19: mod_base = OTHER; note = S-phosphorothioate
  modified_base 19: mod_base = OTHER; note = 2-fluororibose uracil
  modified_base 19..20: mod_base = OTHER; note = S-phosphorothioate
  modified_base 20: mod_base = OTHER; note = 2-fluororibose uracil
  modified_base 20..21: mod_base = OTHER; note = S-phosphorothioate
  modified_base 21: mod_base = OTHER; note = 2-fluororibose uracil
  modified_base 21..22: mod_base = OTHER; note = S-phosphorothioate
  modified_base 22: mod_base = OTHER; note = 2-fluororibose cytosine
  modified_base 22..23: mod_base = OTHER; note = S-phosphorothioate
  modified_base 23: mod_base = OTHER; note = 2-fluororibose uracil
  modified_base 23..24: mod_base = OTHER; note = S-phosphorothioate
  modified_base 24: mod_base = OTHER; note = deoxyribose 6-amino-9-substituted 8,9-dihydro-7H-purin-8-one
  modified_base 24..25: mod_base = OTHER; note = S-phosphorothioate
  modified_base 25: mod_base = OTHER; note = S-propanetriol guanine
  modified_base 25..26: mod_base = OTHER; note = S-phosphorothioate
  modified_base 26: mod_base = um
  modified_base 26..27: mod_base = OTHER; note = S-phosphorothioate
  modified_base 27: mod_base = OTHER; note = 2-fluororibose cytosine
  modified_base 27..28: mod_base = OTHER; note = S-phosphorothioate
  modified_base 28: mod_base = gm
  modified_base 28..29: mod_base = OTHER; note = S-phosphorothioate
  modified_base 29: mod_base = OTHER; note = 2-O-methylribose adenine
  modified_base 29..30: mod_base = OTHER; note R-N-(1,3-dimethylimidazolidin-2-ylidene)phosphoramidate
  modified_base 30: mod_base = um
  source 1..30: mol_type = other RNA

SEQ ID NO: 596 - RNA, 30 nt, synthetic construct; identical to SEQ ID NO: 80
  misc_feature 1..30: note = Synthetic: WV-44380
  misc_feature 1..30: note = Synthetic: ADR-0104004
  modified_base 1: mod_base = cm
  modified_base 1..2: mod_base = OTHER; note R-N-(1,3-dimethylimidazolidin-2-ylidene)phosphoramidate
  modified_base 2: mod_base = cm
  modified_base 2..3: mod_base = OTHER; note = S-phosphorothioate
  modified_base 3: mod_base = cm
  modified_base 3..4: mod_base = OTHER; note = S-phosphorothioate
  modified_base 4: mod_base = OTHER; note = 2-fluororibose adenine
  modified_base 4..5: mod_base = OTHER; note = S-phosphorothioate
  modified_base 5: mod_base = OTHER; note = 2-fluororibose guanine
  modified_base 5..6: mod_base = OTHER; note = S-phosphorothioate
  modified_base 6: mod_base = OTHER; note = 2-fluororibose cytosine
  modified_base 6..7: mod_base = OTHER; note = S-phosphorothioate
  modified_base 7: mod_base = OTHER; note = 2-fluororibose adenine
  modified_base 7..8: mod_base = OTHER; note = S-phosphorothioate
  modified_base 8: mod_base = OTHER; note = 2-fluororibose guanine
  modified_base 8..9: mod_base = OTHER; note = S-phosphorothioate
  modified_base 9: mod_base = OTHER; note = 2-fluororibose cytosine
  modified_base 9..10: mod_base = OTHER; note = S-phosphorothioate
  modified_base 10: mod_base = OTHER; note = 2-fluororibose uracil
  modified_base 10..11: mod_base = OTHER; note = S-phosphorothioate
  modified_base 11: mod_base = OTHER; note = 2-fluororibose uracil
  modified_base 11..12: mod_base = OTHER; note = S-phosphorothioate
  modified_base 12: mod_base = OTHER; note = 2-fluororibose cytosine
  modified_base 12..13: mod_base = OTHER; note = S-phosphorothioate
  modified_base 13: mod_base = OTHER; note = 2-fluororibose adenine
  modified_base 13..14: mod_base = OTHER; note = S-phosphorothioate
  modified_base 14: mod_base = OTHER; note = 2-fluororibose guanine
  modified_base 14..15: mod_base = OTHER; note = S-phosphorothioate
  modified_base 15: mod_base = OTHER; note = 2-fluororibose uracil
  modified_base 15..16: mod_base = OTHER; note = S-phosphorothioate
  modified_base 16: mod_base = OTHER; note = 2-fluororibose cytosine
  modified_base 16..17: mod_base = OTHER; note = S-phosphorothioate
  modified_base 17: mod_base = OTHER; note = 2-fluororibose cytosine
  modified_base 17..18: mod_base = OTHER; note = S-phosphorothioate
  modified_base 18: mod_base = OTHER; note = 2-fluororibose cytosine
  modified_base 18..19: mod_base = OTHER; note = S-phosphorothioate
  modified_base 19: mod_base = OTHER; note = 2-fluororibose uracil
  modified_base 19..20: mod_base = OTHER; note = S-phosphorothioate
  modified_base 20: mod_base = OTHER; note = 2-fluororibose uracil
  modified_base 20..21: mod_base = OTHER; note = S-phosphorothioate
  modified_base 21: mod_base = OTHER; note = 2-fluororibose uracil
  modified_base 21..22: mod_base = OTHER; note = S-phosphorothioate
  modified_base 22: mod_base = OTHER; note = 2-fluororibose cytosine
  modified_base 22..23: mod_base = OTHER; note = S-phosphorothioate
  modified_base 23: mod_base = OTHER; note = S-propanetriol thymine
  modified_base 23..24: mod_base = OTHER; note = S-phosphorothioate
  modified_base 24: mod_base = OTHER; note = S-propanetriol cytosine
  modified_base 24..25: mod_base = OTHER; note = S-phosphorothioate
  modified_base 25: mod_base = OTHER; note = deoxyribose inosine
  modified_base 25..26: mod_base = OTHER; note S-N-(1,3-dimethylimidazolidin-2-ylidene)phosphoramidate
  modified_base 26: mod_base = um
  modified_base 26..27: mod_base = OTHER; note = S-phosphorothioate
  modified_base 27: mod_base = OTHER; note = 2-fluororibose cytosine
  modified_base 27..28: mod_base = OTHER; note = S-phosphorothioate
  modified_base 28: mod_base = gm
  modified_base 28..29: mod_base = OTHER; note = S-phosphorothioate
  modified_base 29: mod_base = OTHER; note = 2-O-methylribose adenine
  modified_base 29..30: mod_base = OTHER; note R-N-(1,3-dimethylimidazolidin-2-ylidene)phosphoramidate
  modified_base 30: mod_base = um
  source 1..30: mol_type = other RNA

SEQ ID NO: 597 - RNA, 30 nt, synthetic construct; identical to SEQ ID NO: 134
  misc_feature 1..30: note = Synthetic: WV-44381
  misc_feature 1..30: note = Synthetic: ADR-0104003
  modified_base 1: mod_base = cm
  modified_base 1..2: mod_base = OTHER; note R-N-(1,3-dimethylimidazolidin-2-ylidene)phosphoramidate
  modified_base 2: mod_base = cm
  modified_base 2..3: mod_base = OTHER; note = S-phosphorothioate
  modified_base 3: mod_base = cm
  modified_base 3..4: mod_base = OTHER; note = S-phosphorothioate
  modified_base 4: mod_base = OTHER; note = 2-fluororibose adenine
  modified_base 4..5: mod_base = OTHER; note = S-phosphorothioate
  modified_base 5: mod_base = OTHER; note = 2-fluororibose guanine
  modified_base 5..6: mod_base = OTHER; note = S-phosphorothioate
  modified_base 6: mod_base = OTHER; note = 2-fluororibose cytosine
  modified_base 6..7: mod_base = OTHER; note = S-phosphorothioate
  modified_base 7: mod_base = OTHER; note = 2-fluororibose adenine
  modified_base 7..8: mod_base = OTHER; note = S-phosphorothioate
  modified_base 8: mod_base = OTHER; note = 2-fluororibose guanine
  modified_base 8..9: mod_base = OTHER; note = S-phosphorothioate
  modified_base 9: mod_base = OTHER; note = 2-fluororibose cytosine
  modified_base 9..10: mod_base = OTHER; note = S-phosphorothioate
  modified_base 10: mod_base = OTHER; note = 2-fluororibose uracil
  modified_base 10..11: mod_base = OTHER; note = S-phosphorothioate
  modified_base 11: mod_base = OTHER; note = 2-fluororibose uracil
  modified_base 11..12: mod_base = OTHER; note = S-phosphorothioate
  modified_base 12: mod_base = OTHER; note = 2-fluororibose cytosine
  modified_base 12..13: mod_base = OTHER; note = S-phosphorothioate
  modified_base 13: mod_base = OTHER; note = 2-fluororibose adenine
  modified_base 13..14: mod_base = OTHER; note = S-phosphorothioate
  modified_base 14: mod_base = OTHER; note = 2-fluororibose guanine
  modified_base 14..15: mod_base = OTHER; note = S-phosphorothioate
  modified_base 15: mod_base = OTHER; note = 2-fluororibose uracil
  modified_base 15..16: mod_base = OTHER; note = S-phosphorothioate
  modified_base 16: mod_base = OTHER; note = 2-fluororibose cytosine
  modified_base 16..17: mod_base = OTHER; note = S-phosphorothioate
  modified_base 17: mod_base = OTHER; note = 2-fluororibose cytosine
  modified_base 17..18: mod_base = OTHER; note = S-phosphorothioate
  modified_base 18: mod_base = OTHER; note = 2-fluororibose cytosine
  modified_base 18..19: mod_base = OTHER; note = S-phosphorothioate
  modified_base 19: mod_base = OTHER; note = 2-fluororibose uracil
  modified_base 19..20: mod_base = OTHER; note = S-phosphorothioate
  modified_base 20: mod_base = OTHER; note = 2-fluororibose uracil
  modified_base 20..21: mod_base = OTHER; note = S-phosphorothioate
  modified_base 21: mod_base = OTHER; note = 2-fluororibose uracil
  modified_base 21..22: mod_base = OTHER; note = S-phosphorothioate
  modified_base 22: mod_base = OTHER; note = 2-fluororibose cytosine
  modified_base 22..23: mod_base = OTHER; note = S-phosphorothioate
  modified_base 23: mod_base = OTHER; note = R-propanetriol thymine
  modified_base 23..24: mod_base = OTHER; note = S-phosphorothioate
  modified_base 24: mod_base = OTHER; note = deoxyribose 6-amino-9-substituted 8,9-dihydro-7H-purin-8-one
  modified_base 24..25: mod_base = OTHER; note = S-phosphorothioate
  modified_base 25: mod_base = OTHER; note = deoxyribose inosine
  modified_base 25..26: mod_base = OTHER; note S-N-(1,3-dimethylimidazolidin-2-ylidene)phosphoramidate
  modified_base 26: mod_base = um
  modified_base 26..27: mod_base = OTHER; note = S-phosphorothioate
  modified_base 27: mod_base = OTHER; note = 2-fluororibose cytosine
  modified_base 27..28: mod_base = OTHER; note = S-phosphorothioate
  modified_base 28: mod_base = gm
  modified_base 28..29: mod_base = OTHER; note = S-phosphorothioate
  modified_base 29: mod_base = OTHER; note = 2-O-methylribose adenine
  modified_base 29..30: mod_base = OTHER; note R-N-(1,3-dimethylimidazolidin-2-ylidene)phosphoramidate
  modified_base 30: mod_base = um
  source 1..30: mol_type = other RNA

SEQ ID NO: 598 - RNA, 30 nt, synthetic construct; identical to SEQ ID NO: 80
  misc_feature 1..30: note = Synthetic: WV-44382
  misc_feature 1..30: note = Synthetic: ADR-0104006
  modified_base 1: mod_base = cm
  modified_base 1..2: mod_base = OTHER; note R-N-(1,3-dimethylimidazolidin-2-ylidene)phosphoramidate
  modified_base 2: mod_base = cm
  modified_base 2..3: mod_base = OTHER; note = S-phosphorothioate
  modified_base 3: mod_base = cm
  modified_base 3..4: mod_base = OTHER; note = S-phosphorothioate
  modified_base 4: mod_base = OTHER; note = 2-fluororibose adenine
  modified_base 4..5: mod_base = OTHER; note = S-phosphorothioate
  modified_base 5: mod_base = OTHER; note = 2-fluororibose guanine
  modified_base 5..6: mod_base = OTHER; note = S-phosphorothioate
  modified_base 6: mod_base = OTHER; note = 2-fluororibose cytosine
  modified_base 6..7: mod_base = OTHER; note = S-phosphorothioate
  modified_base 7: mod_base = OTHER; note = 2-fluororibose adenine
  modified_base 7..8: mod_base = OTHER; note = S-phosphorothioate
  modified_base 8: mod_base = OTHER; note = 2-fluororibose guanine
  modified_base 8..9: mod_base = OTHER; note = S-phosphorothioate
  modified_base 9: mod_base = OTHER; note = 2-fluororibose cytosine
  modified_base 9..10: mod_base = OTHER; note = S-phosphorothioate
  modified_base 10: mod_base = OTHER; note = 2-fluororibose uracil
  modified_base 10..11: mod_base = OTHER; note = S-phosphorothioate
  modified_base 11: mod_base = OTHER; note = 2-fluororibose uracil
  modified_base 11..12: mod_base = OTHER; note = S-phosphorothioate
  modified_base 12: mod_base = OTHER; note = 2-fluororibose cytosine
  modified_base 12..13: mod_base = OTHER; note = S-phosphorothioate
  modified_base 13: mod_base = OTHER; note = 2-fluororibose adenine
  modified_base 13..14: mod_base = OTHER; note = S-phosphorothioate
  modified_base 14: mod_base = OTHER; note = 2-fluororibose guanine
  modified_base 14..15: mod_base = OTHER; note = S-phosphorothioate
  modified_base 15: mod_base = OTHER; note = 2-fluororibose uracil
  modified_base 15..16: mod_base = OTHER; note = S-phosphorothioate
  modified_base 16: mod_base = OTHER; note = 2-fluororibose cytosine
  modified_base 16..17: mod_base = OTHER; note = S-phosphorothioate
  modified_base 17: mod_base = OTHER; note = 2-fluororibose cytosine
  modified_base 17..18: mod_base = OTHER; note = S-phosphorothioate
  modified_base 18: mod_base = OTHER; note = 2-fluororibose cytosine
  modified_base 18..19: mod_base = OTHER; note = S-phosphorothioate
  modified_base 19: mod_base = OTHER; note = 2-fluororibose uracil
  modified_base 19..20: mod_base = OTHER; note = S-phosphorothioate
  modified_base 20: mod_base = OTHER; note = 2-fluororibose uracil
  modified_base 20..21: mod_base = OTHER; note = S-phosphorothioate
  modified_base 21: mod_base = OTHER; note = 2-fluororibose uracil
  modified_base 21..22: mod_base = OTHER; note = S-phosphorothioate
  modified_base 22: mod_base = OTHER; note = 2-fluororibose cytosine
  modified_base 22..23: mod_base = OTHER; note = S-phosphorothioate
  modified_base 23: mod_base = OTHER; note = 2-fluororibose uracil
  modified_base 23..24: mod_base = OTHER; note = S-phosphorothioate
  modified_base 24: mod_base = OTHER; note = R-propanetriol cytosine
  modified_base 24..25: mod_base = OTHER; note = S-phosphorothioate
  modified_base 25: mod_base = OTHER; note = deoxyribose inosine
  modified_base 25..26: mod_base = OTHER; note S-N-(1,3-dimethylimidazolidin-2-ylidene)phosphoramidate
  modified_base 26: mod_base = um
  modified_base 26..27: mod_base = OTHER; note = S-phosphorothioate
  modified_base 27: mod_base = OTHER; note = 2-fluororibose cytosine
  modified_base 27..28: mod_base = OTHER; note = S-phosphorothioate
  modified_base 28: mod_base = gm
  modified_base 28..29: mod_base = OTHER; note = S-phosphorothioate
  modified_base 29: mod_base = OTHER; note = 2-O-methylribose adenine
  modified_base 29..30: mod_base = OTHER; note R-N-(1,3-dimethylimidazolidin-2-ylidene)phosphoramidate
  modified_base 30: mod_base = um
  source 1..30: mol_type = other RNA

SEQ ID NO: 599 - RNA, 30 nt, synthetic construct; identical to SEQ ID NO: 134
  misc_feature 1..30: note = Synthetic: WV-44383
  misc_feature 1..30: note = Synthetic: ADR-0104013
  modified_base 1: mod_base = cm
  modified_base 1..2: mod_base = OTHER; note R-N-(1,3-dimethylimidazolidin-2-ylidene)phosphoramidate
  modified_base 2: mod_base = cm
  modified_base 2..3: mod_base = OTHER; note = S-phosphorothioate
  modified_base 3: mod_base = cm
  modified_base 3..4: mod_base = OTHER; note = S-phosphorothioate
  modified_base 4: mod_base = OTHER; note = 2-fluororibose adenine
  modified_base 4..5: mod_base = OTHER; note = S-phosphorothioate
  modified_base 5: mod_base = OTHER; note = 2-fluororibose guanine
  modified_base 5..6: mod_base = OTHER; note = S-phosphorothioate
  modified_base 6: mod_base = OTHER; note = 2-fluororibose cytosine
  modified_base 6..7: mod_base = OTHER; note = S-phosphorothioate
  modified_base 7: mod_base = OTHER; note = 2-fluororibose adenine
  modified_base 7..8: mod_base = OTHER; note = S-phosphorothioate
  modified_base 8: mod_base = OTHER; note = 2-fluororibose guanine
  modified_base 8..9: mod_base = OTHER; note = S-phosphorothioate
  modified_base 9: mod_base = OTHER; note = 2-fluororibose cytosine
  modified_base 9..10: mod_base = OTHER; note = S-phosphorothioate
  modified_base 10: mod_base = OTHER; note = 2-fluororibose uracil
  modified_base 10..11: mod_base = OTHER; note = S-phosphorothioate
  modified_base 11: mod_base = OTHER; note = 2-fluororibose uracil
  modified_base 11..12: mod_base = OTHER; note = S-phosphorothioate
  modified_base 12: mod_base = OTHER; note = 2-fluororibose cytosine
  modified_base 12..13: mod_base = OTHER; note = S-phosphorothioate
  modified_base 13: mod_base = OTHER; note = 2-fluororibose adenine
  modified_base 13..14: mod_base = OTHER; note = S-phosphorothioate
  modified_base 14: mod_base = OTHER; note = 2-fluororibose guanine
  modified_base 14..15: mod_base = OTHER; note = S-phosphorothioate
  modified_base 15: mod_base = OTHER; note = 2-fluororibose uracil
  modified_base 15..16: mod_base = OTHER; note = S-phosphorothioate
  modified_base 16: mod_base = OTHER; note = 2-fluororibose cytosine
  modified_base 16..17: mod_base = OTHER; note = S-phosphorothioate
  modified_base 17: mod_base = OTHER; note = 2-fluororibose cytosine
  modified_base 17..18: mod_base = OTHER; note = S-phosphorothioate
  modified_base 18: mod_base = OTHER; note = 2-fluororibose cytosine
  modified_base 18..19: mod_base = OTHER; note = S-phosphorothioate
  modified_base 19: mod_base = OTHER; note = 2-fluororibose uracil
  modified_base 19..20: mod_base = OTHER; note = S-phosphorothioate
  modified_base 20: mod_base = OTHER; note = 2-fluororibose uracil
  modified_base 20..21: mod_base = OTHER; note = S-phosphorothioate
  modified_base 21: mod_base = OTHER; note = 2-fluororibose uracil
  modified_base 21..22: mod_base = OTHER; note = S-phosphorothioate
  modified_base 22: mod_base = OTHER; note = 2-fluororibose cytosine
  modified_base 22..23: mod_base = OTHER; note = S-phosphorothioate
  modified_base 23: mod_base = OTHER; note = 2-fluororibose uracil
  modified_base 23..24: mod_base = OTHER; note = S-phosphorothioate
  modified_base 24: mod_base = OTHER; note = deoxyribose 6-amino-9-substituted 8,9-dihydro-7H-purin-8-one
  modified_base 24..25: mod_base = OTHER; note = S-phosphorothioate
  modified_base 25: mod_base = OTHER; note = R-propanetriol guanine
  modified_base 25..26: mod_base = OTHER; note = S-phosphorothioate
  modified_base 26: mod_base = um
  modified_base 26..27: mod_base = OTHER; note = S-phosphorothioate
  modified_base 27: mod_base = OTHER; note = 2-fluororibose cytosine
  modified_base 27..28: mod_base = OTHER; note = S-phosphorothioate
  modified_base 28: mod_base = gm
  modified_base 28..29: mod_base = OTHER; note = S-phosphorothioate
  modified_base 29: mod_base = OTHER; note = 2-O-methylribose adenine
  modified_base 29..30: mod_base = OTHER; note R-N-(1,3-dimethylimidazolidin-2-ylidene)phosphoramidate
  modified_base 30: mod_base = um
  source 1..30: mol_type = other RNA

SEQ ID NO: 600 - RNA, 30 nt, synthetic construct; identical to SEQ ID NO: 80
  misc_feature 1..30: note = Synthetic: WV-44384
  misc_feature 1..30: note = Synthetic: ADR-0104002
  modified_base 1: mod_base = cm
  modified_base 1..2: mod_base = OTHER; note R-N-(1,3-dimethylimidazolidin-2-ylidene)phosphoramidate
  modified_base 2: mod_base = cm
  modified_base 2..3: mod_base = OTHER; note = S-phosphorothioate
  modified_base 3: mod_base = cm
  modified_base 3..4: mod_base = OTHER; note = S-phosphorothioate
  modified_base 4: mod_base = OTHER; note = 2-fluororibose adenine
  modified_base 4..5: mod_base = OTHER; note = S-phosphorothioate
  modified_base 5: mod_base = OTHER; note = 2-fluororibose guanine
  modified_base 5..6: mod_base = OTHER; note = S-phosphorothioate
  modified_base 6: mod_base = OTHER; note = 2-fluororibose cytosine
  modified_base 6..7: mod_base = OTHER; note = S-phosphorothioate
  modified_base 7: mod_base = OTHER; note = 2-fluororibose adenine
  modified_base 7..8: mod_base = OTHER; note = S-phosphorothioate
  modified_base 8: mod_base = OTHER; note = 2-fluororibose guanine
  modified_base 8..9: mod_base = OTHER; note = S-phosphorothioate
  modified_base 9: mod_base = OTHER; note = 2-fluororibose cytosine
  modified_base 9..10: mod_base = OTHER; note = S-phosphorothioate
  modified_base 10: mod_base = OTHER; note = 2-fluororibose uracil
  modified_base 10..11: mod_base = OTHER; note = S-phosphorothioate
  modified_base 11: mod_base = OTHER; note = 2-fluororibose uracil
  modified_base 11..12: mod_base = OTHER; note = S-phosphorothioate
  modified_base 12: mod_base = OTHER; note = 2-fluororibose cytosine
  modified_base 12..13: mod_base = OTHER; note = S-phosphorothioate
  modified_base 13: mod_base = OTHER; note = 2-fluororibose adenine
  modified_base 13..14: mod_base = OTHER; note = S-phosphorothioate
  modified_base 14: mod_base = OTHER; note = 2-fluororibose guanine
  modified_base 14..15: mod_base = OTHER; note = S-phosphorothioate
  modified_base 15: mod_base = OTHER; note = 2-fluororibose uracil
  modified_base 15..16: mod_base = OTHER; note = S-phosphorothioate
  modified_base 16: mod_base = OTHER; note = 2-fluororibose cytosine
  modified_base 16..17: mod_base = OTHER; note = S-phosphorothioate
  modified_base 17: mod_base = OTHER; note = 2-fluororibose cytosine
  modified_base 17..18: mod_base = OTHER; note = S-phosphorothioate
  modified_base 18: mod_base = OTHER; note = 2-fluororibose cytosine
  modified_base 18..19: mod_base = OTHER; note = S-phosphorothioate
  modified_base 19: mod_base = OTHER; note = 2-fluororibose uracil
  modified_base 19..20: mod_base = OTHER; note = S-phosphorothioate
  modified_base 20: mod_base = OTHER; note = 2-fluororibose uracil
  modified_base 20..21: mod_base = OTHER; note = S-phosphorothioate
  modified_base 21: mod_base = OTHER; note = 2-fluororibose uracil
  modified_base 21..22: mod_base = OTHER; note = S-phosphorothioate
  modified_base 22: mod_base = OTHER; note = 2-fluororibose cytosine
  modified_base 22..23: mod_base = OTHER; note = S-phosphorothioate
  modified_base 23: mod_base = OTHER; note = R-propanetriol thymine
  modified_base 23..24: mod_base = OTHER; note = S-phosphorothioate
  modified_base 24: mod_base = OTHER; note = R-propanetriol cytosine
  modified_base 24..25: mod_base = OTHER; note = S-phosphorothioate
  modified_base 25: mod_base = OTHER; note = deoxyribose inosine
  modified_base 25..26: mod_base = OTHER; note S-N-(1,3-dimethylimidazolidin-2-ylidene)phosphoramidate
  modified_base 26: mod_base = um
  modified_base 26..27: mod_base = OTHER; note = S-phosphorothioate
  modified_base 27: mod_base = OTHER; note = 2-fluororibose cytosine
  modified_base 27..28: mod_base = OTHER; note = S-phosphorothioate
  modified_base 28: mod_base = gm
  modified_base 28..29: mod_base = OTHER; note = S-phosphorothioate
  modified_base 29: mod_base = OTHER; note = 2-O-methylribose adenine
  modified_base 29..30: mod_base = OTHER; note R-N-(1,3-dimethylimidazolidin-2-ylidene)phosphoramidate
  modified_base 30: mod_base = um
  source 1..30: mol_type = other RNA

SEQ ID NO: 601 - RNA, 30 nt, synthetic construct; identical to SEQ ID NO: 80
  misc_feature 1..30: note = Synthetic: WV-44385
  misc_feature 1..30: note = Synthetic: ADR-0104009
  modified_base 1: mod_base = cm
  modified_base 1..2: mod_base = OTHER; note R-N-(1,3-dimethylimidazolidin-2-ylidene)phosphoramidate
  modified_base 2: mod_base = cm
  modified_base 2..3: mod_base = OTHER; note = S-phosphorothioate
  modified_base 3: mod_base = cm
  modified_base 3..4: mod_base = OTHER; note = S-phosphorothioate
  modified_base 4: mod_base = OTHER; note = 2-fluororibose adenine
  modified_base 4..5: mod_base = OTHER; note = S-phosphorothioate
  modified_base 5: mod_base = OTHER; note = 2-fluororibose guanine
  modified_base 5..6: mod_base = OTHER; note = S-phosphorothioate
  modified_base 6: mod_base = OTHER; note = 2-fluororibose cytosine
  modified_base 6..7: mod_base = OTHER; note = S-phosphorothioate
  modified_base 7: mod_base = OTHER; note = 2-fluororibose adenine
  modified_base 7..8: mod_base = OTHER; note = S-phosphorothioate
  modified_base 8: mod_base = OTHER; note = 2-fluororibose guanine
  modified_base 8..9: mod_base = OTHER; note = S-phosphorothioate
  modified_base 9: mod_base = OTHER; note = 2-fluororibose cytosine
  modified_base 9..10: mod_base = OTHER; note = S-phosphorothioate
  modified_base 10: mod_base = OTHER; note = 2-fluororibose uracil
  modified_base 10..11: mod_base = OTHER; note = S-phosphorothioate
  modified_base 11: mod_base = OTHER; note = 2-fluororibose uracil
  modified_base 11..12: mod_base = OTHER; note = S-phosphorothioate
  modified_base 12: mod_base = OTHER; note = 2-fluororibose cytosine
  modified_base 12..13: mod_base = OTHER; note = S-phosphorothioate
  modified_base 13: mod_base = OTHER; note = 2-fluororibose adenine
  modified_base 13..14: mod_base = OTHER; note = S-phosphorothioate
  modified_base 14: mod_base = OTHER; note = 2-fluororibose guanine
  modified_base 14..15: mod_base = OTHER; note = S-phosphorothioate
  modified_base 15: mod_base = OTHER; note = 2-fluororibose uracil
  modified_base 15..16: mod_base = OTHER; note = S-phosphorothioate
  modified_base 16: mod_base = OTHER; note = 2-fluororibose cytosine
  modified_base 16..17: mod_base = OTHER; note = S-phosphorothioate
  modified_base 17: mod_base = OTHER; note = 2-fluororibose cytosine
  modified_base 17..18: mod_base = OTHER; note = S-phosphorothioate
  modified_base 18: mod_base = OTHER; note = 2-fluororibose cytosine
  modified_base 18..19: mod_base = OTHER; note = S-phosphorothioate
  modified_base 19: mod_base = OTHER; note = 2-fluororibose uracil
  modified_base 19..20: mod_base = OTHER; note = S-phosphorothioate
  modified_base 20: mod_base = OTHER; note = 2-fluororibose uracil
  modified_base 20..21: mod_base = OTHER; note = S-phosphorothioate
  modified_base 21: mod_base = OTHER; note = 2-fluororibose uracil
  modified_base 21..22: mod_base = OTHER; note = S-phosphorothioate
  modified_base 22: mod_base = OTHER; note = 2-fluororibose cytosine
  modified_base 22..23: mod_base = OTHER; note = S-phosphorothioate
  modified_base 23: mod_base = OTHER; note = 2-fluororibose uracil
  modified_base 23..24: mod_base = OTHER; note = S-phosphorothioate
  modified_base 24: mod_base = OTHER; note = S-propanetriol isocytosine
  modified_base 24..25: mod_base = OTHER; note = S-phosphorothioate
  modified_base 25: mod_base = OTHER; note = deoxyribose inosine
  modified_base 25..26: mod_base = OTHER; note S-N-(1,3-dimethylimidazolidin-2-ylidene)phosphoramidate
  modified_base 26: mod_base = um
  modified_base 26..27: mod_base = OTHER; note = S-phosphorothioate
  modified_base 27: mod_base = OTHER; note = 2-fluororibose cytosine
  modified_base 27..28: mod_base = OTHER; note = S-phosphorothioate
  modified_base 28: mod_base = gm
  modified_base 28..29: mod_base = OTHER; note = S-phosphorothioate
  modified_base 29: mod_base = OTHER; note = 2-O-methylribose adenine
  modified_base 29..30: mod_base = OTHER; note R-N-(1,3-dimethylimidazolidin-2-ylidene)phosphoramidate
  modified_base 30: mod_base = um
  source 1..30: mol_type = other RNA

SEQ ID NO: 602 - RNA, 30 nt, synthetic construct; identical to SEQ ID NO: 80
  misc_feature 1..30: note = Synthetic: WV-44386
  misc_feature 1..30: note = Synthetic: ADR-0104007
  modified_base 1: mod_base = cm
  modified_base 1..2: mod_base = OTHER; note R-N-(1,3-dimethylimidazolidin-2-ylidene)phosphoramidate
  modified_base 2: mod_base = cm
  modified_base 2..3: mod_base = OTHER; note = S-phosphorothioate
  modified_base 3: mod_base = cm
  modified_base 3..4: mod_base = OTHER; note = S-phosphorothioate
  modified_base 4: mod_base = OTHER; note = 2-fluororibose adenine
  modified_base 4..5: mod_base = OTHER; note = S-phosphorothioate
  modified_base 5: mod_base = OTHER; note = 2-fluororibose guanine
  modified_base 5..6: mod_base = OTHER; note = S-phosphorothioate
  modified_base 6: mod_base = OTHER; note = 2-fluororibose cytosine
  modified_base 6..7: mod_base = OTHER; note = S-phosphorothioate
  modified_base 7: mod_base = OTHER; note = 2-fluororibose adenine
  modified_base 7..8: mod_base = OTHER; note = S-phosphorothioate
  modified_base 8: mod_base = OTHER; note = 2-fluororibose guanine
  modified_base 8..9: mod_base = OTHER; note = S-phosphorothioate
  modified_base 9: mod_base = OTHER; note = 2-fluororibose cytosine
  modified_base 9..10: mod_base = OTHER; note = S-phosphorothioate
  modified_base 10: mod_base = OTHER; note = 2-fluororibose uracil
  modified_base 10..11: mod_base = OTHER; note = S-phosphorothioate
  modified_base 11: mod_base = OTHER; note = 2-fluororibose uracil
  modified_base 11..12: mod_base = OTHER; note = S-phosphorothioate
  modified_base 12: mod_base = OTHER; note = 2-fluororibose cytosine
  modified_base 12..13: mod_base = OTHER; note = S-phosphorothioate
  modified_base 13: mod_base = OTHER; note = 2-fluororibose adenine
  modified_base 13..14: mod_base = OTHER; note = S-phosphorothioate
  modified_base 14: mod_base = OTHER; note = 2-fluororibose guanine
  modified_base 14..15: mod_base = OTHER; note = S-phosphorothioate
  modified_base 15: mod_base = OTHER; note = 2-fluororibose uracil
  modified_base 15..16: mod_base = OTHER; note = S-phosphorothioate
  modified_base 16: mod_base = OTHER; note = 2-fluororibose cytosine
  modified_base 16..17: mod_base = OTHER; note = S-phosphorothioate
  modified_base 17: mod_base = OTHER; note = 2-fluororibose cytosine
  modified_base 17..18: mod_base = OTHER; note = S-phosphorothioate
  modified_base 18: mod_base = OTHER; note = 2-fluororibose cytosine
  modified_base 18..19: mod_base = OTHER; note = S-phosphorothioate
  modified_base 19: mod_base = OTHER; note = 2-fluororibose uracil
  modified_base 19..20: mod_base = OTHER; note = S-phosphorothioate
  modified_base 20: mod_base = OTHER; note = 2-fluororibose uracil
  modified_base 20..21: mod_base = OTHER; note = S-phosphorothioate
  modified_base 21: mod_base = OTHER; note = 2-fluororibose uracil
  modified_base 21..22: mod_base = OTHER; note = S-phosphorothioate
  modified_base 22: mod_base = OTHER; note = 2-fluororibose cytosine
  modified_base 22..23: mod_base = OTHER; note = S-phosphorothioate
  modified_base 23: mod_base = OTHER; note = 2-fluororibose uracil
  modified_base 23..24: mod_base = OTHER; note = S-phosphorothioate
  modified_base 24: mod_base = OTHER; note = R-propanetriol isocytosine
  modified_base 24..25: mod_base = OTHER; note = S-phosphorothioate
  modified_base 25: mod_base = OTHER; note = deoxyribose inosine
  modified_base 25..26: mod_base = OTHER; note S-N-(1,3-dimethylimidazolidin-2-ylidene)phosphoramidate
  modified_base 26: mod_base = um
  modified_base 26..27: mod_base = OTHER; note = S-phosphorothioate
  modified_base 27: mod_base = OTHER; note = 2-fluororibose cytosine
  modified_base 27..28: mod_base = OTHER; note = S-phosphorothioate
  modified_base 28: mod_base = gm
  modified_base 28..29: mod_base = OTHER; note = S-phosphorothioate
  modified_base 29: mod_base = OTHER; note = 2-O-methylribose adenine
  modified_base 29..30: mod_base = OTHER; note R-N-(1,3-dimethylimidazolidin-2-ylidene)phosphoramidate
  modified_base 30: mod_base = um
  source 1..30: mol_type = other RNA

SEQ ID NO: 603 - RNA, 29 nt, synthetic construct
  misc_feature 1..29: note = Synthetic: WV-44387
  misc_feature 1..29: note = Synthetic: ADR-0106317
  modified_base 1: mod_base = cm
  modified_base 1..2: mod_base = OTHER; note R-N-(1,3-dimethylimidazolidin-2-ylidene)phosphoramidate
  modified_base 2: mod_base = cm
  modified_base 2..3: mod_base = OTHER; note = S-phosphorothioate
  modified_base 3: mod_base = cm
  modified_base 3..4: mod_base = OTHER; note = S-phosphorothioate
  modified_base 4: mod_base = OTHER; note = 2-fluororibose adenine
  modified_base 4..5: mod_base = OTHER; note = S-phosphorothioate
  modified_base 5: mod_base = OTHER; note = 2-fluororibose guanine
  modified_base 5..6: mod_base = OTHER; note = S-phosphorothioate
  modified_base 6: mod_base = OTHER; note = 2-fluororibose cytosine
  modified_base 6..7: mod_base = OTHER; note = S-phosphorothioate
  modified_base 7: mod_base = OTHER; note = 2-fluororibose adenine
  modified_base 7..8: mod_base = OTHER; note = S-phosphorothioate
  modified_base 8: mod_base = OTHER; note = 2-fluororibose guanine
  modified_base 8..9: mod_base = OTHER; note = S-phosphorothioate
  modified_base 9: mod_base = OTHER; note = 2-fluororibose cytosine
  modified_base 9..10: mod_base = OTHER; note = S-phosphorothioate
  modified_base 10: mod_base = OTHER; note = 2-fluororibose uracil
  modified_base 10..11: mod_base = OTHER; note = S-phosphorothioate
  modified_base 11: mod_base = OTHER; note = 2-fluororibose uracil
  modified_base 11..12: mod_base = OTHER; note = S-phosphorothioate
  modified_base 12: mod_base = OTHER; note = 2-fluororibose cytosine
  modified_base 12..13: mod_base = OTHER; note = S-phosphorothioate
  modified_base 13: mod_base = OTHER; note = 2-fluororibose adenine
  modified_base 13..14: mod_base = OTHER; note = S-phosphorothioate
  modified_base 14: mod_base = OTHER; note = 2-fluororibose guanine
  modified_base 14..15: mod_base = OTHER; note = S-phosphorothioate
  modified_base 15: mod_base = OTHER; note = 2-fluororibose uracil
  modified_base 15..16: mod_base = OTHER; note = S-phosphorothioate
  modified_base 16: mod_base = OTHER; note = 2-fluororibose cytosine
  modified_base 16..17: mod_base = OTHER; note = S-phosphorothioate
  modified_base 17: mod_base = OTHER; note = 2-fluororibose cytosine
  modified_base 17..18: mod_base = OTHER; note = S-phosphorothioate
  modified_base 18: mod_base = OTHER; note = 2-fluororibose cytosine
  modified_base 18..19: mod_base = OTHER; note = S-phosphorothioate
  modified_base 19: mod_base = OTHER; note = 2-fluororibose uracil
  modified_base 19..20: mod_base = OTHER; note = S-phosphorothioate
  modified_base 20: mod_base = OTHER; note = 2-fluororibose uracil
  modified_base 20..21: mod_base = OTHER; note = S-phosphorothioate
  modified_base 21: mod_base = OTHER; note = 2-fluororibose uracil
  modified_base 21..22: mod_base = OTHER; note = S-phosphorothioate
  modified_base 22: mod_base = OTHER; note = 2-fluororibose cytosine
  modified_base 22..23: mod_base = OTHER; note = S-phosphorothioate; 1,2-dideoxyribose (5-3 connectivity); S-phosphorothioate
  modified_base 23: mod_base = OTHER; note = deoxyribose 6-amino-9-substituted 8,9-dihydro-7H-purin-8-one
  modified_base 23..24: mod_base = OTHER; note = S-phosphorothioate
  modified_base 24: mod_base = OTHER; note = deoxyribose inosine
  modified_base 24..25: mod_base = OTHER; note S-N-(1,3-dimethylimidazolidin-2-ylidene)phosphoramidate
  modified_base 25: mod_base = um
  modified_base 25..26: mod_base = OTHER; note = S-phosphorothioate
  modified_base 26: mod_base = OTHER; note = 2-fluororibose cytosine
  modified_base 26..27: mod_base = OTHER; note = S-phosphorothioate
  modified_base 27: mod_base = gm
  modified_base 27..28: mod_base = OTHER; note = S-phosphorothioate
  modified_base 28: mod_base = OTHER; note = 2-O-methylribose adenine
  modified_base 28..29: mod_base = OTHER; note R-N-(1,3-dimethylimidazolidin-2-ylidene)phosphoramidate
  modified_base 29: mod_base = um
  source 1..29: mol_type = other RNA
cccagcagcttcagtccctttcagtcgat

SEQ ID NO: 604 - RNA, 29 nt, synthetic construct
  misc_feature 1..29: note = Synthetic: WV-44388
  misc_feature 1..29: note = Synthetic: ADR-0106318
  modified_base 1: mod_base = cm
  modified_base 1..2: mod_base = OTHER; note R-N-(1,3-dimethylimidazolidin-2-ylidene)phosphoramidate
  modified_base 2: mod_base = cm
  modified_base 2..3: mod_base = OTHER; note = S-phosphorothioate
  modified_base 3: mod_base = cm
  modified_base 3..4: mod_base = OTHER; note = S-phosphorothioate
  modified_base 4: mod_base = OTHER; note = 2-fluororibose adenine
  modified_base 4..5: mod_base = OTHER; note = S-phosphorothioate
  modified_base 5: mod_base = OTHER; note = 2-fluororibose guanine
  modified_base 5..6: mod_base = OTHER; note = S-phosphorothioate
  modified_base 6: mod_base = OTHER; note = 2-fluororibose cytosine
  modified_base 6..7: mod_base = OTHER; note = S-phosphorothioate
  modified_base 7: mod_base = OTHER; note = 2-fluororibose adenine
  modified_base 7..8: mod_base = OTHER; note = S-phosphorothioate
  modified_base 8: mod_base = OTHER; note = 2-fluororibose guanine
  modified_base 8..9: mod_base = OTHER; note = S-phosphorothioate
  modified_base 9: mod_base = OTHER; note = 2-fluororibose cytosine
  modified_base 9..10: mod_base = OTHER; note = S-phosphorothioate
  modified_base 10: mod_base = OTHER; note = 2-fluororibose uracil
  modified_base 10..11: mod_base = OTHER; note = S-phosphorothioate
  modified_base 11: mod_base = OTHER; note = 2-fluororibose uracil
  modified_base 11..12: mod_base = OTHER; note = S-phosphorothioate
  modified_base 12: mod_base = OTHER; note = 2-fluororibose cytosine
  modified_base 12..13: mod_base = OTHER; note = S-phosphorothioate
  modified_base 13: mod_base = OTHER; note = 2-fluororibose adenine
  modified_base 13..14: mod_base = OTHER; note = S-phosphorothioate
  modified_base 14: mod_base = OTHER; note = 2-fluororibose guanine
  modified_base 14..15: mod_base = OTHER; note = S-phosphorothioate
  modified_base 15: mod_base = OTHER; note = 2-fluororibose uracil
  modified_base 15..16: mod_base = OTHER; note = S-phosphorothioate
  modified_base 16: mod_base = OTHER; note = 2-fluororibose cytosine
  modified_base 16..17: mod_base = OTHER; note = S-phosphorothioate
  modified_base 17: mod_base = OTHER; note = 2-fluororibose cytosine
  modified_base 17..18: mod_base = OTHER; note = S-phosphorothioate
  modified_base 18: mod_base = OTHER; note = 2-fluororibose cytosine
  modified_base 18..19: mod_base = OTHER; note = S-phosphorothioate
  modified_base 19: mod_base = OTHER; note = 2-fluororibose uracil
  modified_base 19..20: mod_base = OTHER; note = S-phosphorothioate
  modified_base 20: mod_base = OTHER; note = 2-fluororibose uracil
  modified_base 20..21: mod_base = OTHER; note = S-phosphorothioate
  modified_base 21: mod_base = OTHER; note = 2-fluororibose uracil
  modified_base 21..22: mod_base = OTHER; note = S-phosphorothioate
  modified_base 22: mod_base = OTHER; note = 2-fluororibose cytosine
  modified_base 22..23: mod_base = OTHER; note = S-phosphorothioate
  modified_base 23: mod_base = OTHER; note = 2-fluororibose uracil
  modified_base 23..24: mod_base = OTHER; note = S-phosphorothioate; 1,2-dideoxyribose (5-3 connectivity); S-phosphorothioate
  modified_base 24: mod_base = OTHER; note = deoxyribose inosine
  modified_base 24..25: mod_base = OTHER; note S-N-(1,3-dimethylimidazolidin-2-ylidene)phosphoramidate
  modified_base 25: mod_base = um
  modified_base 25..26: mod_base = OTHER; note = S-phosphorothioate
  modified_base 26: mod_base = OTHER; note = 2-fluororibose cytosine
  modified_base 26..27: mod_base = OTHER; note = S-phosphorothioate
  modified_base 27: mod_base = gm
  modified_base 27..28: mod_base = OTHER; note = S-phosphorothioate
  modified_base 28: mod_base = OTHER; note = 2-O-methylribose adenine
  modified_base 28..29: mod_base = OTHER; note R-N-(1,3-dimethylimidazolidin-2-ylidene)phosphoramidate
  modified_base 29: mod_base = um
  source 1..29: mol_type = other RNA
cccagcagcttcagtccctttctgtcgat

SEQ ID NO: 605 - RNA, 29 nt, synthetic construct
  misc_feature 1..29: note = Synthetic: WV-44389
  misc_feature 1..29: note = Synthetic: ADR-0106319
  modified_base 1: mod_base = cm
  modified_base 1..2: mod_base = OTHER; note R-N-(1,3-dimethylimidazolidin-2-ylidene)phosphoramidate
  modified_base 2: mod_base = cm
  modified_base 2..3: mod_base = OTHER; note = S-phosphorothioate
  modified_base 3: mod_base = cm
  modified_base 3..4: mod_base = OTHER; note = S-phosphorothioate
  modified_base 4: mod_base = OTHER; note = 2-fluororibose adenine
  modified_base 4..5: mod_base = OTHER; note = S-phosphorothioate
  modified_base 5: mod_base = OTHER; note = 2-fluororibose guanine
  modified_base 5..6: mod_base = OTHER; note = S-phosphorothioate
  modified_base 6: mod_base = OTHER; note = 2-fluororibose cytosine
  modified_base 6..7: mod_base = OTHER; note = S-phosphorothioate
  modified_base 7: mod_base = OTHER; note = 2-fluororibose adenine
  modified_base 7..8: mod_base = OTHER; note = S-phosphorothioate
  modified_base 8: mod_base = OTHER; note = 2-fluororibose guanine
  modified_base 8..9: mod_base = OTHER; note = S-phosphorothioate
  modified_base 9: mod_base = OTHER; note = 2-fluororibose cytosine
  modified_base 9..10: mod_base = OTHER; note = S-phosphorothioate
  modified_base 10: mod_base = OTHER; note = 2-fluororibose uracil
  modified_base 10..11: mod_base = OTHER; note = S-phosphorothioate
  modified_base 11: mod_base = OTHER; note = 2-fluororibose uracil
  modified_base 11..12: mod_base = OTHER; note = S-phosphorothioate
  modified_base 12: mod_base = OTHER; note = 2-fluororibose cytosine
  modified_base 12..13: mod_base = OTHER; note = S-phosphorothioate
  modified_base 13: mod_base = OTHER; note = 2-fluororibose adenine
  modified_base 13..14: mod_base = OTHER; note = S-phosphorothioate
  modified_base 14: mod_base = OTHER; note = 2-fluororibose guanine
  modified_base 14..15: mod_base = OTHER; note = S-phosphorothioate
  modified_base 15: mod_base = OTHER; note = 2-fluororibose uracil
  modified_base 15..16: mod_base = OTHER; note = S-phosphorothioate
  modified_base 16: mod_base = OTHER; note = 2-fluororibose cytosine
  modified_base 16..17: mod_base = OTHER; note = S-phosphorothioate
  modified_base 17: mod_base = OTHER; note = 2-fluororibose cytosine
  modified_base 17..18: mod_base = OTHER; note = S-phosphorothioate
  modified_base 18: mod_base = OTHER; note = 2-fluororibose cytosine
  modified_base 18..19: mod_base = OTHER; note = S-phosphorothioate
  modified_base 19: mod_base = OTHER; note = 2-fluororibose uracil
  modified_base 19..20: mod_base = OTHER; note = S-phosphorothioate
  modified_base 20: mod_base = OTHER; note = 2-fluororibose uracil
  modified_base 20..21: mod_base = OTHER; note = S-phosphorothioate
  modified_base 21: mod_base = OTHER; note = 2-fluororibose uracil
  modified_base 21..22: mod_base = OTHER; note = S-phosphorothioate
  modified_base 22: mod_base = OTHER; note = 2-fluororibose cytosine
  modified_base 22..23: mod_base = OTHER; note = S-phosphorothioate
  modified_base 23: mod_base = OTHER; note = 2-fluororibose uracil
  modified_base 23..24: mod_base = OTHER; note = S-phosphorothioate
  modified_base 24: mod_base = OTHER; note = deoxyribose 6-amino-9-substituted 8,9-dihydro-7H-purin-8-one
  modified_base 24..25: mod_base = OTHER; note = S-phosphorothioate; 1,2-dideoxyribose (5-3 connectivity); R-N-(1,3-dimethylimidazolidin-2-ylidene)phosphoramidate
  modified_base 25: mod_base = um
  modified_base 25..26: mod_base = OTHER; note = S-phosphorothioate
  modified_base 26: mod_base = OTHER; note = 2-fluororibose cytosine
  modified_base 26..27: mod_base = OTHER; note = S-phosphorothioate
  modified_base 27: mod_base = gm
  modified_base 27..28: mod_base = OTHER; note = S-phosphorothioate
  modified_base 28: mod_base = OTHER; note = 2-O-methylribose adenine
  modified_base 28..29: mod_base = OTHER; note R-N-(1,3-dimethylimidazolidin-2-ylidene)phosphoramidate
  modified_base 29: mod_base = um
  source 1..29: mol_type = other RNA
cccagcagcttcagtccctttctatcgat

SEQ ID NO: 606 - RNA, 30 nt, synthetic construct; identical to SEQ ID NO: 80
  misc_feature 1..30: note = Synthetic: WV-44390
  misc_feature 1..30: note = Synthetic: ADR-0104011
  modified_base 1: mod_base = cm
  modified_base 1..2: mod_base = OTHER; note R-N-(1,3-dimethylimidazolidin-2-ylidene)phosphoramidate
  modified_base 2: mod_base = cm
  modified_base 2..3: mod_base = OTHER; note = S-phosphorothioate
  modified_base 3: mod_base = cm
  modified_base 3..4: mod_base = OTHER; note = S-phosphorothioate
  modified_base 4: mod_base = OTHER; note = 2-fluororibose adenine
  modified_base 4..5: mod_base = OTHER; note = S-phosphorothioate
  modified_base 5: mod_base = OTHER; note = 2-fluororibose guanine
  modified_base 5..6: mod_base = OTHER; note = S-phosphorothioate
  modified_base 6: mod_base = OTHER; note = 2-fluororibose cytosine
  modified_base 6..7: mod_base = OTHER; note = S-phosphorothioate
  modified_base 7: mod_base = OTHER; note = 2-fluororibose adenine
  modified_base 7..8: mod_base = OTHER; note = S-phosphorothioate
  modified_base 8: mod_base = OTHER; note = 2-fluororibose guanine
  modified_base 8..9: mod_base = OTHER; note = S-phosphorothioate
  modified_base 9: mod_base = OTHER; note = 2-fluororibose cytosine
  modified_base 9..10: mod_base = OTHER; note = S-phosphorothioate
  modified_base 10: mod_base = OTHER; note = 2-fluororibose uracil
  modified_base 10..11: mod_base = OTHER; note = S-phosphorothioate
  modified_base 11: mod_base = OTHER; note = 2-fluororibose uracil
  modified_base 11..12: mod_base = OTHER; note = S-phosphorothioate
  modified_base 12: mod_base = OTHER; note = 2-fluororibose cytosine
  modified_base 12..13: mod_base = OTHER; note = S-phosphorothioate
  modified_base 13: mod_base = OTHER; note = 2-fluororibose adenine
  modified_base 13..14: mod_base = OTHER; note = S-phosphorothioate
  modified_base 14: mod_base = OTHER; note = 2-fluororibose guanine
  modified_base 14..15: mod_base = OTHER; note = S-phosphorothioate
  modified_base 15: mod_base = OTHER; note = 2-fluororibose uracil
  modified_base 15..16: mod_base = OTHER; note = S-phosphorothioate
  modified_base 16: mod_base = OTHER; note = 2-fluororibose cytosine
  modified_base 16..17: mod_base = OTHER; note = S-phosphorothioate
  modified_base 17: mod_base = OTHER; note = 2-fluororibose cytosine
  modified_base 17..18: mod_base = OTHER; note = S-phosphorothioate
  modified_base 18: mod_base = OTHER; note = 2-fluororibose cytosine
  modified_base 18..19: mod_base = OTHER; note = S-phosphorothioate
  modified_base 19: mod_base = OTHER; note = 2-fluororibose uracil
  modified_base 19..20: mod_base = OTHER; note = S-phosphorothioate
  modified_base 20: mod_base = OTHER; note = 2-fluororibose uracil
  modified_base 20..21: mod_base = OTHER; note = S-phosphorothioate
  modified_base 21: mod_base = OTHER; note = 2-fluororibose uracil
  modified_base 21..22: mod_base = OTHER; note = S-phosphorothioate
  modified_base 22: mod_base = OTHER; note = 2-fluororibose cytosine
  modified_base 22..23: mod_base = OTHER; note = S-phosphorothioate
  modified_base 23: mod_base = OTHER; note = 2-fluororibose uracil
  modified_base 23..24: mod_base = OTHER; note = S-phosphorothioate
  modified_base 24: mod_base = OTHER; note = deoxyribose cytosine
  modified_base 24..25: mod_base = OTHER; note = S-phosphorothioate
  modified_base 25: mod_base = OTHER; note = deoxyribose inosine
  modified_base 25..26: mod_base = OTHER; note S-N-(1,3-dimethylimidazolidin-2-ylidene)phosphoramidate
  modified_base 26: mod_base = um
  modified_base 26..27: mod_base = OTHER; note = S-phosphorothioate
  modified_base 27: mod_base = OTHER; note = 2-fluororibose cytosine
  modified_base 27..28: mod_base = OTHER; note = S-phosphorothioate
  modified_base 28: mod_base = gm
  modified_base 28..29: mod_base = OTHER; note = S-phosphorothioate
  modified_base 29: mod_base = OTHER; note = 2-O-methylribose adenine
  modified_base 29..30: mod_base = OTHER; note R-N-(1,3-dimethylimidazolidin-2-ylidene)phosphoramidate
  modified_base 30: mod_base = um
  source 1..30: mol_type = other RNA

SEQ ID NO: 607 - RNA, 30 nt, synthetic construct; identical to SEQ ID NO: 134
  misc_feature 1..30: note = Synthetic: WV-44276
  misc_feature 1..30: note = Synthetic: ADR-0104070
  modified_base 1: mod_base = cm
  modified_base 1..2: mod_base = OTHER; note R-N-(1,3-dimethylimidazolidin-2-ylidene)phosphoramidate
  modified_base 2: mod_base = cm
  modified_base 2..3: mod_base = OTHER; note = S-phosphorothioate
  modified_base 3: mod_base = cm
  modified_base 3..4: mod_base = OTHER; note = S-phosphorothioate
  modified_base 4: mod_base = OTHER; note = 2-fluororibose adenine
  modified_base 4..5: mod_base = OTHER; note = S-phosphorothioate
  modified_base 5: mod_base = OTHER; note = 2-fluororibose guanine
  modified_base 5..6: mod_base = OTHER; note = S-phosphorothioate
  modified_base 6: mod_base = OTHER; note = 2-fluororibose cytosine
  modified_base 7: mod_base = OTHER; note = 2-O-methylribose adenine
  modified_base 7..8: mod_base = OTHER; note = S-phosphorothioate
  modified_base 8: mod_base = OTHER; note = 2-fluororibose guanine
  modified_base 8..9: mod_base = OTHER; note = S-phosphorothioate
  modified_base 9: mod_base = OTHER; note = 2-fluororibose cytosine
  modified_base 10: mod_base = um
  modified_base 10..11: mod_base = OTHER; note = S-phosphorothioate
  modified_base 11: mod_base = OTHER; note = 2-fluororibose uracil
  modified_base 11..12: mod_base = OTHER; note R-N-(1,3-dimethylimidazolidin-2-ylidene)phosphoramidate
  modified_base 12: mod_base = cm
  modified_base 13: mod_base = OTHER; note = 2-fluororibose adenine
  modified_base 14: mod_base = OTHER; note = 2-fluororibose guanine
  modified_base 14..15: mod_base = OTHER; note R-N-(1,3-dimethylimidazolidin-2-ylidene)phosphoramidate
  modified_base 15: mod_base = OTHER; note = 2-fluororibose uracil
  modified_base 16: mod_base = cm
  modified_base 16..17: mod_base = OTHER; note = S-phosphorothioate
  modified_base 17: mod_base = OTHER; note = 2-fluororibose cytosine
  modified_base 17..18: mod_base = OTHER; note = S-phosphorothioate
  modified_base 18: mod_base = OTHER; note = 2-fluororibose cytosine
  modified_base 18..19: mod_base = OTHER; note = S-phosphorothioate
  modified_base 19: mod_base = OTHER; note = 2-fluororibose uracil
  modified_base 19..20: mod_base = OTHER; note R-N-(1,3-dimethylimidazolidin-2-ylidene)phosphoramidate
  modified_base 20: mod_base = OTHER; note = 2-fluororibose uracil
  modified_base 21: mod_base = um
  modified_base 22: mod_base = OTHER; note = 2-fluororibose cytosine
  modified_base 22..23: mod_base = OTHER; note = S-phosphorothioate
  modified_base 23: mod_base = OTHER; note = 2-fluororibose uracil
  modified_base 23..24: mod_base = OTHER; note = S-phosphorothioate
  modified_base 24: mod_base = OTHER; note = deoxyribose 6-amino-9-substituted 8,9-dihydro-7H-purin-8-one
  modified_base 24..25: mod_base = OTHER; note = S-phosphorothioate
  modified_base 25: mod_base = OTHER; note = deoxyribose inosine
  modified_base 25..26: mod_base = OTHER; note S-N-(1,3-dimethylimidazolidin-2-ylidene)phosphoramidate
  modified_base 26: mod_base = um
  modified_base 27: mod_base = OTHER; note = 2-fluororibose cytosine
  modified_base 27..28: mod_base = OTHER; note = S-phosphorothioate
  modified_base 28: mod_base = gm
  modified_base 28..29: mod_base = OTHER; note = S-phosphorothioate
  modified_base 29: mod_base = OTHER; note = 2-O-methylribose adenine
  modified_base 29..30: mod_base = OTHER; note R-N-(1,3-dimethylimidazolidin-2-ylidene)phosphoramidate
  modified_base 30: mod_base = um
  source 1..30: mol_type = other RNA

SEQ ID NO: 608 - RNA, 30 nt, synthetic construct; identical to SEQ ID NO: 134
  misc_feature 1..30: note = Synthetic: WV-44277
  misc_feature 1..30: note = Synthetic: ADR-0104073
  modified_base 1: mod_base = cm
  modified_base 1..2: mod_base = OTHER; note R-N-(1,3-dimethylimidazolidin-2-ylidene)phosphoramidate
  modified_base 2: mod_base = cm
  modified_base 2..3: mod_base = OTHER; note = S-phosphorothioate
  modified_base 3: mod_base = cm
  modified_base 3..4: mod_base = OTHER; note = S-phosphorothioate
  modified_base 4: mod_base = OTHER; note = 2-fluororibose adenine
  modified_base 4..5: mod_base = OTHER; note = S-phosphorothioate
  modified_base 5: mod_base = OTHER; note = 2-fluororibose guanine
  modified_base 5..6: mod_base = OTHER; note = S-phosphorothioate
  modified_base 6: mod_base = OTHER; note = 2-fluororibose cytosine
  modified_base 7: mod_base = OTHER; note = 2-O-methylribose adenine
  modified_base 7..8: mod_base = OTHER; note = S-phosphorothioate
  modified_base 8: mod_base = OTHER; note = 2-fluororibose guanine
  modified_base 8..9: mod_base = OTHER; note = S-phosphorothioate
  modified_base 9: mod_base = OTHER; note = 2-fluororibose cytosine
  modified_base 10: mod_base = um
  modified_base 11: mod_base = OTHER; note = 2-fluororibose uracil
  modified_base 11..12: mod_base = OTHER; note R-N-(1,3-dimethylimidazolidin-2-ylidene)phosphoramidate
  modified_base 12: mod_base = cm
  modified_base 13: mod_base = OTHER; note = 2-fluororibose adenine
  modified_base 14: mod_base = OTHER; note = 2-fluororibose guanine
  modified_base 14..15: mod_base = OTHER; note R-N-(1,3-dimethylimidazolidin-2-ylidene)phosphoramidate
  modified_base 15: mod_base = OTHER; note = 2-fluororibose uracil
  modified_base 16: mod_base = cm
  modified_base 17: mod_base = OTHER; note = 2-fluororibose cytosine
  modified_base 17..18: mod_base = OTHER; note = S-phosphorothioate
  modified_base 18: mod_base = OTHER; note = 2-fluororibose cytosine
  modified_base 18..19: mod_base = OTHER; note = S-phosphorothioate
  modified_base 19: mod_base = OTHER; note = 2-fluororibose uracil
  modified_base 19..20: mod_base = OTHER; note R-N-(1,3-dimethylimidazolidin-2-ylidene)phosphoramidate
  modified_base 20: mod_base = OTHER; note = 2-fluororibose uracil
  modified_base 21: mod_base = um
  modified_base 22: mod_base = OTHER; note = 2-fluororibose cytosine
  modified_base 22..23: mod_base = OTHER; note = S-phosphorothioate
  modified_base 23: mod_base = OTHER; note = 2-fluororibose uracil
  modified_base 23..24: mod_base = OTHER; note = S-phosphorothioate
  modified_base 24: mod_base = OTHER; note = deoxyribose 6-amino-9-substituted 8,9-dihydro-7H-purin-8-one
  modified_base 24..25: mod_base = OTHER; note = S-phosphorothioate
  modified_base 25: mod_base = OTHER; note = deoxyribose inosine
  modified_base 25..26: mod_base = OTHER; note S-N-(1,3-dimethylimidazolidin-2-ylidene)phosphoramidate
  modified_base 26: mod_base = um
  modified_base 27: mod_base = OTHER; note = 2-fluororibose cytosine
  modified_base 27..28: mod_base = OTHER; note = S-phosphorothioate
  modified_base 28: mod_base = gm
  modified_base 28..29: mod_base = OTHER; note = S-phosphorothioate
  modified_base 29: mod_base = OTHER; note = 2-O-methylribose adenine
  modified_base 29..30: mod_base = OTHER; note R-N-(1,3-dimethylimidazolidin-2-ylidene)phosphoramidate
  modified_base 30: mod_base = um
  source 1..30: mol_type = other RNA

SEQ ID NO: 609 - RNA, 30 nt, synthetic construct; identical to SEQ ID NO: 80
  misc_feature 1..30: note = Synthetic: WV-44349
  misc_feature 1..30: note = Synthetic: ADR-0103776
  modified_base 1: mod_base = OTHER; note = 2-fluororibose cytosine
  modified_base 1..2: mod_base = OTHER; note = R-N-(4-methylbenzenesulfonyl)-phosphoramidate
  modified_base 2: mod_base = OTHER; note = 2-fluororibose cytosine
  modified_base 2..3: mod_base = OTHER; note = S-phosphorothioate
  modified_base 3: mod_base = OTHER; note = 2-fluororibose cytosine
  modified_base 3..4: mod_base = OTHER; note = S-phosphorothioate
  modified_base 4: mod_base = OTHER; note = 2-fluororibose adenine
  modified_base 4..5: mod_base = OTHER; note = S-phosphorothioate
  modified_base 5: mod_base = OTHER; note = 2-fluororibose guanine
  modified_base 5..6: mod_base = OTHER; note = S-phosphorothioate
  modified_base 6: mod_base = OTHER; note = 2-fluororibose cytosine
  modified_base 6..7: mod_base = OTHER; note = S-phosphorothioate
  modified_base 7: mod_base = OTHER; note = 2-fluororibose adenine
  modified_base 7..8: mod_base = OTHER; note = S-phosphorothioate
  modified_base 8: mod_base = OTHER; note = 2-fluororibose guanine
  modified_base 8..9: mod_base = OTHER; note = S-phosphorothioate
  modified_base 9: mod_base = OTHER; note = 2-fluororibose cytosine
  modified_base 9..10: mod_base = OTHER; note = S-phosphorothioate
  modified_base 10: mod_base = OTHER; note = 2-fluororibose uracil
  modified_base 10..11: mod_base = OTHER; note = S-phosphorothioate
  modified_base 11: mod_base = OTHER; note = 2-fluororibose uracil
  modified_base 11..12: mod_base = OTHER; note = S-phosphorothioate
  modified_base 12: mod_base = OTHER; note = 2-fluororibose cytosine
  modified_base 12..13: mod_base = OTHER; note = S-phosphorothioate
  modified_base 13: mod_base = OTHER; note = 2-fluororibose adenine
  modified_base 13..14: mod_base = OTHER; note = S-phosphorothioate
  modified_base 14: mod_base = OTHER; note = 2-fluororibose guanine
  modified_base 14..15: mod_base = OTHER; note = S-phosphorothioate
  modified_base 15: mod_base = OTHER; note = 2-fluororibose uracil
  modified_base 15..16: mod_base = OTHER; note = S-phosphorothioate
  modified_base 16: mod_base = cm
  modified_base 16..17: mod_base = OTHER; note = S-phosphorothioate
  modified_base 17: mod_base = cm
  modified_base 17..18: mod_base = OTHER; note = S-phosphorothioate
  modified_base 18: mod_base = cm
  modified_base 18..19: mod_base = OTHER; note = S-phosphorothioate
  modified_base 19: mod_base = um
  modified_base 19..20: mod_base = OTHER; note = S-phosphorothioate
  modified_base 20: mod_base = um
  modified_base 20..21: mod_base = OTHER; note = S-phosphorothioate
  modified_base 21: mod_base = um
  modified_base 21..22: mod_base = OTHER; note = S-phosphorothioate
  modified_base 22: mod_base = cm
  modified_base 22..23: mod_base = OTHER; note = S-phosphorothioate
  modified_base 23: mod_base = OTHER; note = 2-fluororibose uracil
  modified_base 23..24: mod_base = OTHER; note = S-phosphorothioate
  modified_base 24: mod_base = OTHER; note = deoxyribose cytosine
  modified_base 24..25: mod_base = OTHER; note = S-phosphorothioate
  modified_base 25: mod_base = OTHER; note = deoxyribose inosine
  modified_base 25..26: mod_base = OTHER; note S-N-(1,3-dimethylimidazolidin-2-ylidene)phosphoramidate
  modified_base 26: mod_base = um
  modified_base 26..27: mod_base = OTHER; note = S-phosphorothioate
  modified_base 27: mod_base = cm
  modified_base 27..28: mod_base = OTHER; note = S-phosphorothioate
  modified_base 28: mod_base = gm
  modified_base 28..29: mod_base = OTHER; note = S-phosphorothioate
  modified_base 29: mod_base = OTHER; note = 2-O-methylribose adenine
  modified_base 29..30: mod_base = OTHER; note R-N-(1,3-dimethylimidazolidin-2-ylidene)phosphoramidate
  modified_base 30: mod_base = um
  source 1..30: mol_type = other RNA

SEQ ID NO: 610 - RNA, 30 nt, synthetic construct; identical to SEQ ID NO: 80
  misc_feature 1..30: note = Synthetic: WV-44350
  misc_feature 1..30: note = Synthetic: ADR-0103777
  modified_base 1: mod_base = OTHER; note = 2-fluororibose cytosine
  modified_base 1..2: mod_base = OTHER; note = R-(4-acetamidobenzenesulfonamido)phosphonic acid
  modified_base 2: mod_base = OTHER; note = 2-fluororibose cytosine
  modified_base 2..3: mod_base = OTHER; note = S-phosphorothioate
  modified_base 3: mod_base = OTHER; note = 2-fluororibose cytosine
  modified_base 3..4: mod_base = OTHER; note = S-phosphorothioate
  modified_base 4: mod_base = OTHER; note = 2-fluororibose adenine
  modified_base 4..5: mod_base = OTHER; note = S-phosphorothioate
  modified_base 5: mod_base = OTHER; note = 2-fluororibose guanine
  modified_base 5..6: mod_base = OTHER; note = S-phosphorothioate
  modified_base 6: mod_base = OTHER; note = 2-fluororibose cytosine
  modified_base 6..7: mod_base = OTHER; note = S-phosphorothioate
  modified_base 7: mod_base = OTHER; note = 2-fluororibose adenine
  modified_base 7..8: mod_base = OTHER; note = S-phosphorothioate
  modified_base 8: mod_base = OTHER; note = 2-fluororibose guanine
  modified_base 8..9: mod_base = OTHER; note = S-phosphorothioate
  modified_base 9: mod_base = OTHER; note = 2-fluororibose cytosine
  modified_base 9..10: mod_base = OTHER; note = S-phosphorothioate
  modified_base 10: mod_base = OTHER; note = 2-fluororibose uracil
  modified_base 10..11: mod_base = OTHER; note = S-phosphorothioate
  modified_base 11: mod_base = OTHER; note = 2-fluororibose uracil
  modified_base 11..12: mod_base = OTHER; note = S-phosphorothioate
  modified_base 12: mod_base = OTHER; note = 2-fluororibose cytosine
  modified_base 12..13: mod_base = OTHER; note = S-phosphorothioate
  modified_base 13: mod_base = OTHER; note = 2-fluororibose adenine
  modified_base 13..14: mod_base = OTHER; note = S-phosphorothioate
  modified_base 14: mod_base = OTHER; note = 2-fluororibose guanine
  modified_base 14..15: mod_base = OTHER; note = S-phosphorothioate
  modified_base 15: mod_base = OTHER; note = 2-fluororibose uracil
  modified_base 15..16: mod_base = OTHER; note = S-phosphorothioate
  modified_base 16: mod_base = cm
  modified_base 16..17: mod_base = OTHER; note = S-phosphorothioate
  modified_base 17: mod_base = cm
  modified_base 17..18: mod_base = OTHER; note = S-phosphorothioate
  modified_base 18: mod_base = cm
  modified_base 18..19: mod_base = OTHER; note = S-phosphorothioate
  modified_base 19: mod_base = um
  modified_base 19..20: mod_base = OTHER; note = S-phosphorothioate
  modified_base 20: mod_base = um
  modified_base 20..21: mod_base = OTHER; note = S-phosphorothioate
  modified_base 21: mod_base = um
  modified_base 21..22: mod_base = OTHER; note = S-phosphorothioate
  modified_base 22: mod_base = cm
  modified_base 22..23: mod_base = OTHER; note = S-phosphorothioate
  modified_base 23: mod_base = OTHER; note = 2-fluororibose uracil
  modified_base 23..24: mod_base = OTHER; note = S-phosphorothioate
  modified_base 24: mod_base = OTHER; note = deoxyribose cytosine
  modified_base 24..25: mod_base = OTHER; note = S-phosphorothioate
  modified_base 25: mod_base = OTHER; note = deoxyribose inosine
  modified_base 25..26: mod_base = OTHER; note S-N-(1,3-dimethylimidazolidin-2-ylidene)phosphoramidate
  modified_base 26: mod_base = um
  modified_base 26..27: mod_base = OTHER; note = S-phosphorothioate
  modified_base 27: mod_base = cm
  modified_base 27..28: mod_base = OTHER; note = S-phosphorothioate
  modified_base 28: mod_base = gm
  modified_base 28..29: mod_base = OTHER; note = S-phosphorothioate
  modified_base 29: mod_base = OTHER; note = 2-O-methylribose adenine
  modified_base 29..30: mod_base = OTHER; note R-N-(1,3-dimethylimidazolidin-2-ylidene)phosphoramidate
  modified_base 30: mod_base = um
  source 1..30: mol_type = other RNA

SEQ ID NO: 611 - RNA, 30 nt, synthetic construct; identical to SEQ ID NO: 80
  misc_feature 1..30: note = Synthetic: WV-44351
  misc_feature 1..30: note = Synthetic: ADR-0103778
  modified_base 1: mod_base = OTHER; note = 2-fluororibose cytosine
  modified_base 1..2: mod_base = OTHER; note = R-(butane-1-sulfonamido)phosphonic acid
  modified_base 2: mod_base = OTHER; note = 2-fluororibose cytosine
  modified_base 2..3: mod_base = OTHER; note = S-phosphorothioate
  modified_base 3: mod_base = OTHER; note = 2-fluororibose cytosine
  modified_base 3..4: mod_base = OTHER; note = S-phosphorothioate
  modified_base 4: mod_base = OTHER; note = 2-fluororibose adenine
  modified_base 4..5: mod_base = OTHER; note = S-phosphorothioate
  modified_base 5: mod_base = OTHER; note = 2-fluororibose guanine
  modified_base 5..6: mod_base = OTHER; note = S-phosphorothioate
  modified_base 6: mod_base = OTHER; note = 2-fluororibose cytosine
  modified_base 6..7: mod_base = OTHER; note = S-phosphorothioate
  modified_base 7: mod_base = OTHER; note = 2-fluororibose adenine
  modified_base 7..8: mod_base = OTHER; note = S-phosphorothioate
  modified_base 8: mod_base = OTHER; note = 2-fluororibose guanine
  modified_base 8..9: mod_base = OTHER; note = S-phosphorothioate
  modified_base 9: mod_base = OTHER; note = 2-fluororibose cytosine
  modified_base 9..10: mod_base = OTHER; note = S-phosphorothioate
  modified_base 10: mod_base = OTHER; note = 2-fluororibose uracil
  modified_base 10..11: mod_base = OTHER; note = S-phosphorothioate
  modified_base 11: mod_base = OTHER; note = 2-fluororibose uracil
  modified_base 11..12: mod_base = OTHER; note = S-phosphorothioate
  modified_base 12: mod_base = OTHER; note = 2-fluororibose cytosine
  modified_base 12..13: mod_base = OTHER; note = S-phosphorothioate
  modified_base 13: mod_base = OTHER; note = 2-fluororibose adenine
  modified_base 13..14: mod_base = OTHER; note = S-phosphorothioate
  modified_base 14: mod_base = OTHER; note = 2-fluororibose guanine
  modified_base 14..15: mod_base = OTHER; note = S-phosphorothioate
  modified_base 15: mod_base = OTHER; note = 2-fluororibose uracil
  modified_base 15..16: mod_base = OTHER; note = S-phosphorothioate
  modified_base 16: mod_base = cm
  modified_base 16..17: mod_base = OTHER; note = S-phosphorothioate
  modified_base 17: mod_base = cm
  modified_base 17..18: mod_base = OTHER; note = S-phosphorothioate
  modified_base 18: mod_base = cm
  modified_base 18..19: mod_base = OTHER; note = S-phosphorothioate
  modified_base 19: mod_base = um
  modified_base 19..20: mod_base = OTHER; note = S-phosphorothioate
  modified_base 20: mod_base = um
  modified_base 20..21: mod_base = OTHER; note = S-phosphorothioate
  modified_base 21: mod_base = um
  modified_base 21..22: mod_base = OTHER; note = S-phosphorothioate
  modified_base 22: mod_base = cm
  modified_base 22..23: mod_base = OTHER; note = S-phosphorothioate
  modified_base 23: mod_base = OTHER; note = 2-fluororibose uracil
  modified_base 23..24: mod_base = OTHER; note = S-phosphorothioate
  modified_base 24: mod_base = OTHER; note = deoxyribose cytosine
  modified_base 24..25: mod_base = OTHER; note = S-phosphorothioate
  modified_base 25: mod_base = OTHER; note = deoxyribose inosine
  modified_base 25..26: mod_base = OTHER; note S-N-(1,3-dimethylimidazolidin-2-ylidene)phosphoramidate
  modified_base 26: mod_base = um
  modified_base 26..27: mod_base = OTHER; note = S-phosphorothioate
  modified_base 27: mod_base = cm
  modified_base 27..28: mod_base = OTHER; note = S-phosphorothioate
  modified_base 28: mod_base = gm
  modified_base 28..29: mod_base = OTHER; note = S-phosphorothioate
  modified_base 29: mod_base = OTHER; note = 2-O-methylribose adenine
  modified_base 29..30: mod_base = OTHER; note R-N-(1,3-dimethylimidazolidin-2-ylidene)phosphoramidate
  modified_base 30: mod_base = um
  source 1..30: mol_type = other RNA

SEQ ID NO: 612 - RNA, 30 nt, synthetic construct; identical to SEQ ID NO: 80
  misc_feature 1..30: note = Synthetic: WV-44352
  misc_feature 1..30: note = Synthetic: ADR-0103606
  modified_base 1: mod_base = OTHER; note = 2-fluororibose cytosine
  modified_base 1..2: mod_base = OTHER; note R-N-(1,3-dimethylimidazolidin-2-ylidene)phosphoramidate
  modified_base 2: mod_base = OTHER; note = 2-fluororibose cytosine
  modified_base 2..3: mod_base = OTHER; note = S-phosphorothioate
  modified_base 3: mod_base = OTHER; note = 2-fluororibose cytosine
  modified_base 3..4: mod_base = OTHER; note = S-phosphorothioate
  modified_base 4: mod_base = OTHER; note = 2-fluororibose adenine
  modified_base 4..5: mod_base = OTHER; note = S-phosphorothioate
  modified_base 5: mod_base = OTHER; note = 2-fluororibose guanine
  modified_base 5..6: mod_base = OTHER; note = S-phosphorothioate
  modified_base 6: mod_base = OTHER; note = 2-fluororibose cytosine
  modified_base 6..7: mod_base = OTHER; note = S-phosphorothioate
  modified_base 7: mod_base = OTHER; note = 2-fluororibose adenine
  modified_base 7..8: mod_base = OTHER; note = S-phosphorothioate
  modified_base 8: mod_base = OTHER; note = 2-fluororibose guanine
  modified_base 8..9: mod_base = OTHER; note = S-phosphorothioate
  modified_base 9: mod_base = OTHER; note = 2-fluororibose cytosine
  modified_base 9..10: mod_base = OTHER; note = S-phosphorothioate
  modified_base 10: mod_base = OTHER; note = 2-fluororibose uracil
  modified_base 10..11: mod_base = OTHER; note = S-phosphorothioate
  modified_base 11: mod_base = OTHER; note = 2-fluororibose uracil
  modified_base 11..12: mod_base = OTHER; note = S-phosphorothioate
  modified_base 12: mod_base = OTHER; note = 2-fluororibose cytosine
  modified_base 12..13: mod_base = OTHER; note = S-phosphorothioate
  modified_base 13: mod_base = OTHER; note = 2-fluororibose adenine
  modified_base 13..14: mod_base = OTHER; note = S-phosphorothioate
  modified_base 14: mod_base = OTHER; note = 2-fluororibose guanine
  modified_base 14..15: mod_base = OTHER; note = S-phosphorothioate
  modified_base 15: mod_base = OTHER; note = 2-fluororibose uracil
  modified_base 15..16: mod_base = OTHER; note = S-phosphorothioate
  modified_base 16: mod_base = cm
  modified_base 16..17: mod_base = OTHER; note = S-phosphorothioate
  modified_base 17: mod_base = cm
  modified_base 17..18: mod_base = OTHER; note = S-phosphorothioate
  modified_base 18: mod_base = cm
  modified_base 18..19: mod_base = OTHER; note = S-phosphorothioate
  modified_base 19: mod_base = um
  modified_base 19..20: mod_base = OTHER; note = S-phosphorothioate
  modified_base 20: mod_base = um
  modified_base 20..21: mod_base = OTHER; note = S-phosphorothioate
  modified_base 21: mod_base = um
  modified_base 21..22: mod_base = OTHER; note = S-phosphorothioate
  modified_base 22: mod_base = cm
  modified_base 22..23: mod_base = OTHER; note = S-phosphorothioate
  modified_base 23: mod_base = OTHER; note = 2-fluororibose uracil
  modified_base 23..24: mod_base = OTHER; note = S-phosphorothioate
  modified_base 24: mod_base = OTHER; note = deoxyribose cytosine
  modified_base 24..25: mod_base = OTHER; note = S-phosphorothioate
  modified_base 25: mod_base = OTHER; note = deoxyribose inosine
  modified_base 25..26: mod_base = OTHER; note = S-(4-acetamidobenzenesulfonamido)phosphonic acid
  modified_base 26: mod_base = um
  modified_base 26..27: mod_base = OTHER; note = S-phosphorothioate
  modified_base 27: mod_base = cm
  modified_base 27..28: mod_base = OTHER; note = S-phosphorothioate
  modified_base 28: mod_base = gm
  modified_base 28..29: mod_base = OTHER; note = S-phosphorothioate
  modified_base 29: mod_base = OTHER; note = 2-O-methylribose adenine
  modified_base 29..30: mod_base = OTHER; note R-N-(1,3-dimethylimidazolidin-2-ylidene)phosphoramidate
  modified_base 30: mod_base = um
  source 1..30: mol_type = other RNA

SEQ ID NO: 613 - RNA, 30 nt, synthetic construct; identical to SEQ ID NO: 273
  misc_feature 1..30: note = Synthetic: WV-46312
  misc_feature 1..30: note = Synthetic: ADR-0100541
  modified_base 1: mod_base = OTHER; note = triantennary GalNAc with C12 linker linked to 6-aminohexanol linked by phosphate to the 5' end of 2-O-methylribose cytosine
  modified_base 1..2: mod_base = OTHER; note R-N-(1,3-dimethylimidazolidin-2-ylidene)phosphoramidate
  modified_base 2: mod_base = cm
  modified_base 2..3: mod_base = OTHER; note = S-phosphorothioate
  modified_base 3: mod_base = cm
  modified_base 3..4: mod_base = OTHER; note = S-phosphorothioate
  modified_base 4: mod_base = OTHER; note = 2-fluororibose adenine
  modified_base 4..5: mod_base = OTHER; note = S-phosphorothioate
  modified_base 5: mod_base = OTHER; note = 2-fluororibose guanine
  modified_base 5..6: mod_base = OTHER; note = S-phosphorothioate
  modified_base 6: mod_base = cm
  modified_base 7: mod_base = OTHER; note = 2-O-methylribose adenine
  modified_base 7..8: mod_base = OTHER; note = S-phosphorothioate
  modified_base 8: mod_base = OTHER; note = 2-fluororibose guanine
  modified_base 8..9: mod_base = OTHER; note = S-phosphorothioate
  modified_base 9: mod_base = OTHER; note = 2-fluororibose cytosine
  modified_base 10: mod_base = um
  modified_base 10..11: mod_base = OTHER; note = S-phosphorothioate
  modified_base 11: mod_base = OTHER; note = 2-fluororibose uracil
  modified_base 11..12: mod_base = OTHER; note R-N-(1,3-dimethylimidazolidin-2-ylidene)phosphoramidate
  modified_base 12: mod_base = cm
  modified_base 13: mod_base = OTHER; note = 2-fluororibose adenine
  modified_base 13..14: mod_base = OTHER; note = S-phosphorothioate
  modified_base 14: mod_base = OTHER; note = 2-fluororibose guanine
  modified_base 14..15: mod_base = OTHER; note R-N-(1,3-dimethylimidazolidin-2-ylidene)phosphoramidate
  modified_base 15: mod_base = OTHER; note = 2-fluororibose uracil
  modified_base 16: mod_base = cm
  modified_base 16..17: mod_base = OTHER; note = S-phosphorothioate
  modified_base 17: mod_base = OTHER; note = 2-fluororibose cytosine
  modified_base 17..18: mod_base = OTHER; note = S-phosphorothioate
  modified_base 18: mod_base = OTHER; note = 2-fluororibose cytosine
  modified_base 18..19: mod_base = OTHER; note = S-phosphorothioate
  modified_base 19: mod_base = OTHER; note = 2-fluororibose uracil
  modified_base 19..20: mod_base = OTHER; note = S-phosphorothioate
  modified_base 20: mod_base = um
  modified_base 21: mod_base = um
  modified_base 22: mod_base = OTHER; note = 2-fluororibose cytosine
  modified_base 22..23: mod_base = OTHER; note = S-phosphorothioate
  modified_base 23: mod_base = OTHER; note = deoxyribose thymine
  modified_base 23..24: mod_base = OTHER; note = S-phosphorothioate
  modified_base 24: mod_base = OTHER; note = deoxyribose uracil (position 3 connectivity)
  modified_base 24..25: mod_base = OTHER; note = S-phosphorothioate
  modified_base 25: mod_base = OTHER; note = deoxyribose inosine
  modified_base 25..26: mod_base = OTHER; note S-N-(1,3-dimethylimidazolidin-2-ylidene)phosphoramidate
  modified_base 26: mod_base = um
  modified_base 27: mod_base = OTHER; note = 2-fluororibose cytosine
  modified_base 27..28: mod_base = OTHER; note = S-phosphorothioate
  modified_base 28: mod_base = gm
  modified_base 28..29: mod_base = OTHER; note = S-phosphorothioate
  modified_base 29: mod_base = OTHER; note = 2-O-methylribose adenine
  modified_base 29..30: mod_base = OTHER; note R-N-(1,3-dimethylimidazolidin-2-ylidene)phosphoramidate
  modified_base 30: mod_base = um
  source 1..30: mol_type = other RNA

SEQ ID NO: 614 - RNA, 30 nt, synthetic construct; identical to SEQ ID NO: 273
  misc_feature 1..30: note = Synthetic: WV-46318
  misc_feature 1..30: note = Synthetic: ADR-0100547
  modified_base 1: mod_base = OTHER; note = triantennary GalNAc with C12 linker linked to 6-aminohexanol linked by phosphate to the 5' end of 2-O-methylribose cytosine
  modified_base 1..2: mod_base = OTHER; note R-N-(1,3-dimethylimidazolidin-2-ylidene)phosphoramidate
  modified_base 2: mod_base = cm
  modified_base 2..3: mod_base = OTHER; note = S-phosphorothioate
  modified_base 3: mod_base = cm
  modified_base 3..4: mod_base = OTHER; note = S-phosphorothioate
  modified_base 4: mod_base = OTHER; note = 2-fluororibose adenine
  modified_base 4..5: mod_base = OTHER; note = S-phosphorothioate
  modified_base 5: mod_base = OTHER; note = 2-fluororibose guanine
  modified_base 5..6: mod_base = OTHER; note = S-phosphorothioate
  modified_base 6: mod_base = cm
  modified_base 7: mod_base = OTHER; note = 2-O-methylribose adenine
  modified_base 7..8: mod_base = OTHER; note = S-phosphorothioate
  modified_base 8: mod_base = OTHER; note = 2-fluororibose guanine
  modified_base 8..9: mod_base = OTHER; note = S-phosphorothioate
  modified_base 9: mod_base = OTHER; note = 2-fluororibose cytosine
  modified_base 10: mod_base = um
  modified_base 10..11: mod_base = OTHER; note = S-phosphorothioate
  modified_base 11: mod_base = OTHER; note = 2-fluororibose uracil
  modified_base 11..12: mod_base = OTHER; note R-N-(1,3-dimethylimidazolidin-2-ylidene)phosphoramidate
  modified_base 12: mod_base = cm
  modified_base 13: mod_base = OTHER; note = 2-fluororibose adenine
  modified_base 13..14: mod_base = OTHER; note = S-phosphorothioate
  modified_base 14: mod_base = OTHER; note = 2-fluororibose guanine
  modified_base 14..15: mod_base = OTHER; note R-N-(1,3-dimethylimidazolidin-2-ylidene)phosphoramidate
  modified_base 15: mod_base = OTHER; note = 2-fluororibose uracil
  modified_base 16: mod_base = cm
  modified_base 16..17: mod_base = OTHER; note = S-phosphorothioate
  modified_base 17: mod_base = OTHER; note = 2-fluororibose cytosine
  modified_base 17..18: mod_base = OTHER; note = S-phosphorothioate
  modified_base 18: mod_base = OTHER; note = 2-fluororibose cytosine
  modified_base 18..19: mod_base = OTHER; note = S-phosphorothioate
  modified_base 19: mod_base = OTHER; note = 2-fluororibose uracil
  modified_base 19..20: mod_base = OTHER; note R-N-(1,3-dimethylimidazolidin-2-ylidene)phosphoramidate
  modified_base 20: mod_base = um
  modified_base 21: mod_base = um
  modified_base 22: mod_base = OTHER; note = 2-fluororibose cytosine
  modified_base 22..23: mod_base = OTHER; note = S-phosphorothioate
  modified_base 23: mod_base = OTHER; note = deoxyribose thymine
  modified_base 23..24: mod_base = OTHER; note = S-phosphorothioate
  modified_base 24: mod_base = OTHER; note = deoxyribose uracil (position 3 connectivity)
  modified_base 24..25: mod_base = OTHER; note = S-phosphorothioate
  modified_base 25: mod_base = OTHER; note = deoxyribose inosine
  modified_base 25..26: mod_base = OTHER; note S-N-(1,3-dimethylimidazolidin-2-ylidene)phosphoramidate
  modified_base 26: mod_base = um
  modified_base 27: mod_base = OTHER; note = 2-fluororibose cytosine
  modified_base 27..28: mod_base = OTHER; note = S-phosphorothioate
  modified_base 28: mod_base = gm
  modified_base 28..29: mod_base = OTHER; note = S-phosphorothioate
  modified_base 29: mod_base = OTHER; note = 2-O-methylribose adenine
  modified_base 29..30: mod_base = OTHER; note R-N-(1,3-dimethylimidazolidin-2-ylidene)phosphoramidate
  modified_base 30: mod_base = um
  source 1..30: mol_type = other RNA

SEQ ID NO: 615 - RNA, 30 nt, synthetic construct; identical to SEQ ID NO: 273
  misc_feature 1..30: note = Synthetic: WV-46319
  misc_feature 1..30: note = Synthetic: ADR-0100548
  modified_base 1: mod_base = OTHER; note = triantennary GalNAc with C12 linker linked to 6-aminohexanol linked by phosphate to the 5' end of 2-O-methylribose cytosine
  modified_base 1..2: mod_base = OTHER; note R-N-(1,3-dimethylimidazolidin-2-ylidene)phosphoramidate
  modified_base 2: mod_base = cm
  modified_base 2..3: mod_base = OTHER; note = S-phosphorothioate
  modified_base 3: mod_base = cm
  modified_base 3..4: mod_base = OTHER; note = S-phosphorothioate
  modified_base 4: mod_base = OTHER; note = 2-fluororibose adenine
  modified_base 4..5: mod_base = OTHER; note = S-phosphorothioate
  modified_base 5: mod_base = OTHER; note = 2-fluororibose guanine
  modified_base 5..6: mod_base = OTHER; note = S-phosphorothioate
  modified_base 6: mod_base = cm
  modified_base 7: mod_base = OTHER; note = 2-O-methylribose adenine
  modified_base 8: mod_base = OTHER; note = 2-fluororibose guanine
  modified_base 8..9: mod_base = OTHER; note = S-phosphorothioate
  modified_base 9: mod_base = OTHER; note = 2-fluororibose cytosine
  modified_base 10: mod_base = um
  modified_base 10..11: mod_base = OTHER; note = S-phosphorothioate
  modified_base 11: mod_base = OTHER; note = 2-fluororibose uracil
  modified_base 11..12: mod_base = OTHER; note R-N-(1,3-dimethylimidazolidin-2-ylidene)phosphoramidate
  modified_base 12: mod_base = cm
  modified_base 13: mod_base = OTHER; note = 2-fluororibose adenine
  modified_base 13..14: mod_base = OTHER; note = S-phosphorothioate
  modified_base 14: mod_base = OTHER; note = 2-fluororibose guanine
  modified_base 14..15: mod_base = OTHER; note R-N-(1,3-dimethylimidazolidin-2-ylidene)phosphoramidate
  modified_base 15: mod_base = OTHER; note = 2-fluororibose uracil
  modified_base 16: mod_base = cm
  modified_base 16..17: mod_base = OTHER; note = S-phosphorothioate
  modified_base 17: mod_base = OTHER; note = 2-fluororibose cytosine
  modified_base 17..18: mod_base = OTHER; note = S-phosphorothioate
  modified_base 18: mod_base = cm
  modified_base 19: mod_base = OTHER; note = 2-fluororibose uracil
  modified_base 19..20: mod_base = OTHER; note R-N-(1,3-dimethylimidazolidin-2-ylidene)phosphoramidate
  modified_base 20: mod_base = um
  modified_base 21: mod_base = um
  modified_base 22: mod_base = OTHER; note = 2-fluororibose cytosine
  modified_base 22..23: mod_base = OTHER; note = S-phosphorothioate
  modified_base 23: mod_base = OTHER; note = deoxyribose thymine
  modified_base 23..24: mod_base = OTHER; note = S-phosphorothioate
  modified_base 24: mod_base = OTHER; note = deoxyribose uracil (position 3 connectivity)
  modified_base 24..25: mod_base = OTHER; note = S-phosphorothioate
  modified_base 25: mod_base = OTHER; note = deoxyribose inosine
  modified_base 25..26: mod_base = OTHER; note S-N-(1,3-dimethylimidazolidin-2-ylidene)phosphoramidate
  modified_base 26: mod_base = um
  modified_base 27: mod_base = OTHER; note = 2-fluororibose cytosine
  modified_base 27..28: mod_base = OTHER; note = S-phosphorothioate
  modified_base 28: mod_base = gm
  modified_base 28..29: mod_base = OTHER; note = S-phosphorothioate
  modified_base 29: mod_base = OTHER; note = 2-O-methylribose adenine
  modified_base 29..30: mod_base = OTHER; note R-N-(1,3-dimethylimidazolidin-2-ylidene)phosphoramidate
  modified_base 30: mod_base = um
  source 1..30: mol_type = other RNA

SEQ ID NO: 616 - RNA, 30 nt, synthetic construct; identical to SEQ ID NO: 273
  misc_feature 1..30: note = Synthetic: WV-46320
  misc_feature 1..30: note = Synthetic: ADR-0100549
  modified_base 1: mod_base = OTHER; note = triantennary GalNAc with C12 linker linked to 6-aminohexanol linked by phosphate to the 5' end of 2-O-methylribose cytosine
  modified_base 1..2: mod_base = OTHER; note R-N-(1,3-dimethylimidazolidin-2-ylidene)phosphoramidate
  modified_base 2: mod_base = cm
  modified_base 2..3: mod_base = OTHER; note = S-phosphorothioate
  modified_base 3: mod_base = cm
  modified_base 3..4: mod_base = OTHER; note = S-phosphorothioate
  modified_base 4: mod_base = OTHER; note = 2-fluororibose adenine
  modified_base 4..5: mod_base = OTHER; note = S-phosphorothioate
  modified_base 5: mod_base = OTHER; note = 2-fluororibose guanine
  modified_base 5..6: mod_base = OTHER; note = S-phosphorothioate
  modified_base 6: mod_base = OTHER; note = 2-fluororibose cytosine
  modified_base 7: mod_base = OTHER; note = 2-O-methylribose adenine
  modified_base 7..8: mod_base = OTHER; note = S-phosphorothioate
  modified_base 8: mod_base = OTHER; note = 2-fluororibose guanine
  modified_base 8..9: mod_base = OTHER; note = S-phosphorothioate
  modified_base 9: mod_base = cm
  modified_base 10: mod_base = um
  modified_base 10..11: mod_base = OTHER; note = S-phosphorothioate
  modified_base 11: mod_base = OTHER; note = 2-fluororibose uracil
  modified_base 11..12: mod_base = OTHER; note R-N-(1,3-dimethylimidazolidin-2-ylidene)phosphoramidate
  modified_base 12: mod_base = cm
  modified_base 13: mod_base = OTHER; note = 2-fluororibose adenine
  modified_base 13..14: mod_base = OTHER; note = S-phosphorothioate
  modified_base 14: mod_base = OTHER; note = 2-fluororibose guanine
  modified_base 14..15: mod_base = OTHER; note R-N-(1,3-dimethylimidazolidin-2-ylidene)phosphoramidate
  modified_base 15: mod_base = OTHER; note = 2-fluororibose uracil
  modified_base 16: mod_base = cm
  modified_base 16..17: mod_base = OTHER; note = S-phosphorothioate
  modified_base 17: mod_base = OTHER; note = 2-fluororibose cytosine
  modified_base 17..18: mod_base = OTHER; note = S-phosphorothioate
  modified_base 18: mod_base = OTHER; note = 2-fluororibose cytosine
  modified_base 18..19: mod_base = OTHER; note = S-phosphorothioate
  modified_base 19: mod_base = OTHER; note = 2-fluororibose uracil
  modified_base 19..20: mod_base = OTHER; note R-N-(1,3-dimethylimidazolidin-2-ylidene)phosphoramidate
  modified_base 20: mod_base = OTHER; note = 2-fluororibose uracil
  modified_base 20..21: mod_base = OTHER; note = S-phosphorothioate
  modified_base 21: mod_base = um
  modified_base 22: mod_base = OTHER; note = 2-fluororibose cytosine
  modified_base 22..23: mod_base = OTHER; note = S-phosphorothioate
  modified_base 23: mod_base = OTHER; note = deoxyribose thymine
  modified_base 23..24: mod_base = OTHER; note = S-phosphorothioate
  modified_base 24: mod_base = OTHER; note = deoxyribose uracil (position 3 connectivity)
  modified_base 24..25: mod_base = OTHER; note = S-phosphorothioate
  modified_base 25: mod_base = OTHER; note = deoxyribose inosine
  modified_base 25..26: mod_base = OTHER; note S-N-(1,3-dimethylimidazolidin-2-ylidene)phosphoramidate
  modified_base 26: mod_base = um
  modified_base 27: mod_base = OTHER; note = 2-fluororibose cytosine
  modified_base 27..28: mod_base = OTHER; note = S-phosphorothioate
  modified_base 28: mod_base = gm
  modified_base 28..29: mod_base = OTHER; note = S-phosphorothioate
  modified_base 29: mod_base = OTHER; note = 2-O-methylribose adenine
  modified_base 29..30: mod_base = OTHER; note R-N-(1,3-dimethylimidazolidin-2-ylidene)phosphoramidate
  modified_base 30: mod_base = um
  source 1..30: mol_type = other RNA

SEQ ID NO: 617 - RNA, 30 nt, synthetic construct; identical to SEQ ID NO: 273
  misc_feature 1..30: note = Synthetic: WV-46321
  misc_feature 1..30: note = Synthetic: ADR-0100550
  modified_base 1: mod_base = OTHER; note = triantennary GalNAc with C12 linker linked to 6-aminohexanol linked by phosphate to the 5' end of 2-O-methylribose cytosine
  modified_base 1..2: mod_base = OTHER; note R-N-(1,3-dimethylimidazolidin-2-ylidene)phosphoramidate
  modified_base 2: mod_base = cm
  modified_base 2..3: mod_base = OTHER; note = S-phosphorothioate
  modified_base 3: mod_base = cm
  modified_base 3..4: mod_base = OTHER; note = S-phosphorothioate
  modified_base 4: mod_base = OTHER; note = 2-fluororibose adenine
  modified_base 4..5: mod_base = OTHER; note = S-phosphorothioate
  modified_base 5: mod_base = OTHER; note = 2-fluororibose guanine
  modified_base 5..6: mod_base = OTHER; note = S-phosphorothioate
  modified_base 6: mod_base = OTHER; note = 2-fluororibose cytosine
  modified_base 7: mod_base = OTHER; note = 2-O-methylribose adenine
  modified_base 7..8: mod_base = OTHER; note = S-phosphorothioate
  modified_base 8: mod_base = OTHER; note = 2-fluororibose guanine
  modified_base 8..9: mod_base = OTHER; note = S-phosphorothioate
  modified_base 9: mod_base = OTHER; note = 2-fluororibose cytosine
  modified_base 10: mod_base = um
  modified_base 10..11: mod_base = OTHER; note = S-phosphorothioate
  modified_base 11: mod_base = OTHER; note = 2-fluororibose uracil
  modified_base 11..12: mod_base = OTHER; note R-N-(1,3-dimethylimidazolidin-2-ylidene)phosphoramidate
  modified_base 12: mod_base = cm
  modified_base 13: mod_base = OTHER; note = 2-fluororibose adenine
  modified_base 13..14: mod_base = OTHER; note = S-phosphorothioate
  modified_base 14: mod_base = OTHER; note = 2-fluororibose guanine
  modified_base 14..15: mod_base = OTHER; note R-N-(1,3-dimethylimidazolidin-2-ylidene)phosphoramidate
  modified_base 15: mod_base = OTHER; note = 2-fluororibose uracil
  modified_base 16: mod_base = cm
  modified_base 16..17: mod_base = OTHER; note = S-phosphorothioate
  modified_base 17: mod_base = cm
  modified_base 18: mod_base = OTHER; note = 2-fluororibose cytosine
  modified_base 18..19: mod_base = OTHER; note = S-phosphorothioate
  modified_base 19: mod_base = OTHER; note = 2-fluororibose uracil
  modified_base 19..20: mod_base = OTHER; note R-N-(1,3-dimethylimidazolidin-2-ylidene)phosphoramidate
  modified_base 20: mod_base = OTHER; note = 2-fluororibose uracil
  modified_base 20..21: mod_base = OTHER; note = S-phosphorothioate
  modified_base 21: mod_base = um
  modified_base 22: mod_base = OTHER; note = 2-fluororibose cytosine
  modified_base 22..23: mod_base = OTHER; note = S-phosphorothioate
  modified_base 23: mod_base = OTHER; note = deoxyribose thymine
  modified_base 23..24: mod_base = OTHER; note = S-phosphorothioate
  modified_base 24: mod_base = OTHER; note = deoxyribose uracil (position 3 connectivity)
  modified_base 24..25: mod_base = OTHER; note = S-phosphorothioate
  modified_base 25: mod_base = OTHER; note = deoxyribose inosine
  modified_base 25..26: mod_base = OTHER; note S-N-(1,3-dimethylimidazolidin-2-ylidene)phosphoramidate
  modified_base 26: mod_base = um
  modified_base 27: mod_base = OTHER; note = 2-fluororibose cytosine
  modified_base 27..28: mod_base = OTHER; note = S-phosphorothioate
  modified_base 28: mod_base = gm
  modified_base 28..29: mod_base = OTHER; note = S-phosphorothioate
  modified_base 29: mod_base = OTHER; note = 2-O-methylribose adenine
  modified_base 29..30: mod_base = OTHER; note R-N-(1,3-dimethylimidazolidin-2-ylidene)phosphoramidate
  modified_base 30: mod_base = um
  source 1..30: mol_type = other RNA

SEQ ID NO: 618 - RNA, 30 nt, synthetic construct; identical to SEQ ID NO: 273
  misc_feature 1..30: note = Synthetic: WV-46322
  misc_feature 1..30: note = Synthetic: ADR-0100551
  modified_base 1: mod_base = OTHER; note = triantennary GalNAc with C12 linker linked to 6-aminohexanol linked by phosphate to the 5' end of 2-O-methylribose cytosine
  modified_base 1..2: mod_base = OTHER; note R-N-(1,3-dimethylimidazolidin-2-ylidene)phosphoramidate
  modified_base 2: mod_base = cm
  modified_base 2..3: mod_base = OTHER; note = S-phosphorothioate
  modified_base 3: mod_base = cm
  modified_base 3..4: mod_base = OTHER; note = S-phosphorothioate
  modified_base 4: mod_base = OTHER; note = 2-fluororibose adenine
  modified_base 4..5: mod_base = OTHER; note = S-phosphorothioate
  modified_base 5: mod_base = OTHER; note = 2-fluororibose guanine
  modified_base 5..6: mod_base = OTHER; note = S-phosphorothioate
  modified_base 6: mod_base = cm
  modified_base 7: mod_base = OTHER; note = 2-O-methylribose adenine
  modified_base 8: mod_base = OTHER; note = 2-fluororibose guanine
  modified_base 8..9: mod_base = OTHER; note = S-phosphorothioate
  modified_base 9: mod_base = OTHER; note = 2-fluororibose cytosine
  modified_base 9..10: mod_base = OTHER; note = S-phosphorothioate
  modified_base 10: mod_base = OTHER; note = 2-fluororibose uracil
  modified_base 10..11: mod_base = OTHER; note = S-phosphorothioate
  modified_base 11: mod_base = OTHER; note = 2-fluororibose uracil
  modified_base 11..12: mod_base = OTHER; note R-N-(1,3-dimethylimidazolidin-2-ylidene)phosphoramidate
  modified_base 12: mod_base = OTHER; note = 2-fluororibose cytosine
  modified_base 12..13: mod_base = OTHER; note = S-phosphorothioate
  modified_base 13: mod_base = OTHER; note = 2-fluororibose adenine
  modified_base 14: mod_base = OTHER; note = 2-fluororibose guanine
  modified_base 14..15: mod_base = OTHER; note R-N-(1,3-dimethylimidazolidin-2-ylidene)phosphoramidate
  modified_base 15: mod_base = OTHER; note = 2-fluororibose uracil
  modified_base 16: mod_base = cm
  modified_base 17: mod_base = cm
  modified_base 18: mod_base = OTHER; note = 2-fluororibose cytosine
  modified_base 18..19: mod_base = OTHER; note = S-phosphorothioate
  modified_base 19: mod_base = OTHER; note = 2-fluororibose uracil
  modified_base 19..20: mod_base = OTHER; note = S-phosphorothioate
  modified_base 20: mod_base = um
  modified_base 21: mod_base = um
  modified_base 21..22: mod_base = OTHER; note = S-phosphorothioate
  modified_base 22: mod_base = OTHER; note = 2-fluororibose cytosine
  modified_base 22..23: mod_base = OTHER; note = S-phosphorothioate
  modified_base 23: mod_base = OTHER; note = deoxyribose thymine
  modified_base 23..24: mod_base = OTHER; note = S-phosphorothioate
  modified_base 24: mod_base = OTHER; note = deoxyribose uracil (position 3 connectivity)
  modified_base 24..25: mod_base = OTHER; note = S-phosphorothioate
  modified_base 25: mod_base = OTHER; note = deoxyribose inosine
  modified_base 25..26: mod_base = OTHER; note S-N-(1,3-dimethylimidazolidin-2-ylidene)phosphoramidate
  modified_base 26: mod_base = um
  modified_base 27: mod_base = OTHER; note = 2-fluororibose cytosine
  modified_base 27..28: mod_base = OTHER; note = S-phosphorothioate
  modified_base 28: mod_base = gm
  modified_base 28..29: mod_base = OTHER; note = S-phosphorothioate
  modified_base 29: mod_base = OTHER; note = 2-O-methylribose adenine
  modified_base 29..30: mod_base = OTHER; note R-N-(1,3-dimethylimidazolidin-2-ylidene)phosphoramidate
  modified_base 30: mod_base = um
  source 1..30: mol_type = other RNA

SEQ ID NO: 619 - RNA, 30 nt, synthetic construct; identical to SEQ ID NO: 273
  misc_feature 1..30: note = Synthetic: WV-46323
  misc_feature 1..30: note = Synthetic: ADR-0100552
  modified_base 1: mod_base = OTHER; note = triantennary GalNAc with C12 linker linked to 6-aminohexanol linked by phosphate to the 5' end of 2-O-methylribose cytosine
  modified_base 1..2: mod_base = OTHER; note R-N-(1,3-dimethylimidazolidin-2-ylidene)phosphoramidate
  modified_base 2: mod_base = cm
  modified_base 2..3: mod_base = OTHER; note = S-phosphorothioate
  modified_base 3: mod_base = cm
  modified_base 3..4: mod_base = OTHER; note = S-phosphorothioate
  modified_base 4: mod_base = OTHER; note = 2-fluororibose adenine
  modified_base 4..5: mod_base = OTHER; note = S-phosphorothioate
  modified_base 5: mod_base = OTHER; note = 2-fluororibose guanine
  modified_base 5..6: mod_base = OTHER; note = S-phosphorothioate
  modified_base 6: mod_base = OTHER; note = 2-fluororibose cytosine
  modified_base 7: mod_base = OTHER; note = 2-O-methylribose adenine
  modified_base 7..8: mod_base = OTHER; note = S-phosphorothioate
  modified_base 8: mod_base = OTHER; note = 2-fluororibose guanine
  modified_base 8..9: mod_base = OTHER; note = S-phosphorothioate
  modified_base 9: mod_base = OTHER; note = 2-fluororibose cytosine
  modified_base 10: mod_base = um
  modified_base 10..11: mod_base = OTHER; note = S-phosphorothioate
  modified_base 11: mod_base = OTHER; note = 2-fluororibose uracil
  modified_base 11..12: mod_base = OTHER; note R-N-(1,3-dimethylimidazolidin-2-ylidene)phosphoramidate
  modified_base 12: mod_base = cm
  modified_base 13: mod_base = OTHER; note = 2-fluororibose adenine
  modified_base 13..14: mod_base = OTHER; note = S-phosphorothioate
  modified_base 14: mod_base = OTHER; note = 2-fluororibose guanine
  modified_base 14..15: mod_base = OTHER; note R-N-(1,3-dimethylimidazolidin-2-ylidene)phosphoramidate
  modified_base 15: mod_base = OTHER; note = 2-fluororibose uracil
  modified_base 16: mod_base = cm
  modified_base 16..17: mod_base = OTHER; note = S-phosphorothioate
  modified_base 17: mod_base = OTHER; note = 2-fluororibose cytosine
  modified_base 17..18: mod_base = OTHER; note = S-phosphorothioate
  modified_base 18: mod_base = OTHER; note = 2-fluororibose cytosine
  modified_base 18..19: mod_base = OTHER; note = S-phosphorothioate
  modified_base 19: mod_base = OTHER; note = 2-fluororibose uracil
  modified_base 19..20: mod_base = OTHER; note = S-phosphorothioate
  modified_base 20: mod_base = OTHER; note = 2-fluororibose uracil
  modified_base 20..21: mod_base = OTHER; note = S-phosphorothioate
  modified_base 21: mod_base = um
  modified_base 22: mod_base = OTHER; note = 2-fluororibose cytosine
  modified_base 22..23: mod_base = OTHER; note = S-phosphorothioate
  modified_base 23: mod_base = OTHER; note = deoxyribose thymine
  modified_base 23..24: mod_base = OTHER; note = S-phosphorothioate
  modified_base 24: mod_base = OTHER; note = deoxyribose uracil (position 3 connectivity)
  modified_base 24..25: mod_base = OTHER; note = S-phosphorothioate
  modified_base 25: mod_base = OTHER; note = deoxyribose inosine
  modified_base 25..26: mod_base = OTHER; note S-N-(1,3-dimethylimidazolidin-2-ylidene)phosphoramidate
  modified_base 26: mod_base = um
  modified_base 27: mod_base = OTHER; note = 2-fluororibose cytosine
  modified_base 27..28: mod_base = OTHER; note = S-phosphorothioate
  modified_base 28: mod_base = gm
  modified_base 28..29: mod_base = OTHER; note = S-phosphorothioate
  modified_base 29: mod_base = OTHER; note = 2-O-methylribose adenine
  modified_base 29..30: mod_base = OTHER; note R-N-(1,3-dimethylimidazolidin-2-ylidene)phosphoramidate
  modified_base 30: mod_base = um
  source 1..30: mol_type = other RNA

SEQ ID NO: 620 - RNA, 30 nt, synthetic construct
  misc_feature 1..30: note = Synthetic: WV-47580
  misc_feature 1..30: note = Synthetic: ADR-0102100
  modified_base 1: mod_base = OTHER; note = 2-fluororibose guanine
  modified_base 1..2: mod_base = OTHER; note R-N-(1,3-dimethylimidazolidin-2-ylidene)phosphoramidate
  modified_base 2: mod_base = OTHER; note = 2-fluororibose guanine
  modified_base 2..3: mod_base = OTHER; note = S-phosphorothioate
  modified_base 3: mod_base = OTHER; note = 2-fluororibose uracil
  modified_base 3..4: mod_base = OTHER; note = S-phosphorothioate
  modified_base 4: mod_base = OTHER; note = 2-fluororibose guanine
  modified_base 4..5: mod_base = OTHER; note = S-phosphorothioate
  modified_base 5: mod_base = OTHER; note = 2-fluororibose adenine
  modified_base 5..6: mod_base = OTHER; note = S-phosphorothioate
  modified_base 6: mod_base = OTHER; note = 2-fluororibose cytosine
  modified_base 6..7: mod_base = OTHER; note = S-phosphorothioate
  modified_base 7: mod_base = OTHER; note = 2-fluororibose adenine
  modified_base 7..8: mod_base = OTHER; note = S-phosphorothioate
  modified_base 8: mod_base = OTHER; note = 2-fluororibose guanine
  modified_base 8..9: mod_base = OTHER; note = S-phosphorothioate
  modified_base 9: mod_base = OTHER; note = 2-fluororibose cytosine
  modified_base 9..10: mod_base = OTHER; note = S-phosphorothioate
  modified_base 10: mod_base = OTHER; note = 2-fluororibose cytosine
  modified_base 10..11: mod_base = OTHER; note = S-phosphorothioate
  modified_base 11: mod_base = OTHER; note = 2-fluororibose adenine
  modified_base 11..12: mod_base = OTHER; note = S-phosphorothioate
  modified_base 12: mod_base = OTHER; note = 2-fluororibose cytosine
  modified_base 12..13: mod_base = OTHER; note = S-phosphorothioate
  modified_base 13: mod_base = OTHER; note = 2-fluororibose guanine
  modified_base 13..14: mod_base = OTHER; note = S-phosphorothioate
  modified_base 14: mod_base = OTHER; note = 2-fluororibose cytosine
  modified_base 14..15: mod_base = OTHER; note = S-phosphorothioate
  modified_base 15: mod_base = OTHER; note = 2-fluororibose cytosine
  modified_base 15..16: mod_base = OTHER; note = S-phosphorothioate
  modified_base 16: mod_base = cm
  modified_base 16..17: mod_base = OTHER; note = S-phosphorothioate
  modified_base 17: mod_base = OTHER; note = 2-O-methylribose adenine
  modified_base 17..18: mod_base = OTHER; note = S-phosphorothioate
  modified_base 18: mod_base = cm
  modified_base 18..19: mod_base = OTHER; note = S-phosphorothioate
  modified_base 19: mod_base = cm
  modified_base 19..20: mod_base = OTHER; note = S-phosphorothioate
  modified_base 20: mod_base = cm
  modified_base 20..21: mod_base = OTHER; note = S-phosphorothioate
  modified_base 21: mod_base = cm
  modified_base 21..22: mod_base = OTHER; note = S-phosphorothioate
  modified_base 22: mod_base = OTHER; note = 2-O-methylribose adenine
  modified_base 22..23: mod_base = OTHER; note = S-phosphorothioate
  modified_base 23: mod_base = OTHER; note = deoxyribose cytosine
  modified_base 23..24: mod_base = OTHER; note = S-phosphorothioate
  modified_base 24: mod_base = OTHER; note = deoxyribose uracil (position 3 connectivity)
  modified_base 24..25: mod_base = OTHER; note = S-phosphorothioate
  modified_base 25: mod_base = OTHER; note = deoxyribose cytosine
  modified_base 25..26: mod_base = OTHER; note R-N-(1,3-dimethylimidazolidin-2-ylidene)phosphoramidate
  modified_base 26: mod_base = cm
  modified_base 26..27: mod_base = OTHER; note = S-phosphorothioate
  modified_base 27: mod_base = OTHER; note = 2-fluororibose guanine
  modified_base 27..28: mod_base = OTHER; note = S-phosphorothioate
  modified_base 28: mod_base = gm
  modified_base 28..29: mod_base = OTHER; note = S-phosphorothioate
  modified_base 29: mod_base = cm
  modified_base 29..30: mod_base = OTHER; note R-N-(1,3-dimethylimidazolidin-2-ylidene)phosphoramidate
  modified_base 30: mod_base = cm
  source 1..30: mol_type = other RNA
ggtgacagccacgcccaccccactccggcc

SEQ ID NO: 621 - RNA, 30 nt, synthetic construct
  misc_feature 1..30: note = Synthetic: WV-47567
  misc_feature 1..30: note = Synthetic: ADR-0102095
  modified_base 1: mod_base = OTHER; note = 2-fluororibose cytosine
  modified_base 1..2: mod_base = OTHER; note R-N-(1,3-dimethylimidazolidin-2-ylidene)phosphoramidate
  modified_base 2: mod_base = OTHER; note = 2-fluororibose uracil
  modified_base 2..3: mod_base = OTHER; note = S-phosphorothioate
  modified_base 3: mod_base = OTHER; note = 2-fluororibose guanine
  modified_base 3..4: mod_base = OTHER; note = S-phosphorothioate
  modified_base 4: mod_base = OTHER; note = 2-fluororibose uracil
  modified_base 4..5: mod_base = OTHER; note = S-phosphorothioate
  modified_base 5: mod_base = OTHER; note = 2-fluororibose cytosine
  modified_base 5..6: mod_base = OTHER; note = S-phosphorothioate
  modified_base 6: mod_base = OTHER; note = 2-fluororibose cytosine
  modified_base 6..7: mod_base = OTHER; note = S-phosphorothioate
  modified_base 7: mod_base = OTHER; note = 2-fluororibose adenine
  modified_base 7..8: mod_base = OTHER; note = S-phosphorothioate
  modified_base 8: mod_base = OTHER; note = 2-fluororibose guanine
  modified_base 8..9: mod_base = OTHER; note = S-phosphorothioate
  modified_base 9: mod_base = OTHER; note = 2-fluororibose guanine
  modified_base 9..10: mod_base = OTHER; note = S-phosphorothioate
  modified_base 10: mod_base = OTHER; note = 2-fluororibose adenine
  modified_base 10..11: mod_base = OTHER; note = S-phosphorothioate
  modified_base 11: mod_base = OTHER; note = 2-fluororibose adenine
  modified_base 11..12: mod_base = OTHER; note = S-phosphorothioate
  modified_base 12: mod_base = OTHER; note = 2-fluororibose cytosine
  modified_base 12..13: mod_base = OTHER; note = S-phosphorothioate
  modified_base 13: mod_base = OTHER; note = 2-fluororibose guanine
  modified_base 13..14: mod_base = OTHER; note = S-phosphorothioate
  modified_base 14: mod_base = OTHER; note = 2-fluororibose uracil
  modified_base 14..15: mod_base = OTHER; note = S-phosphorothioate
  modified_base 15: mod_base = OTHER; note = 2-fluororibose guanine
  modified_base 15..16: mod_base = OTHER; note = S-phosphorothioate
  modified_base 16: mod_base = um
  modified_base 16..17: mod_base = OTHER; note = S-phosphorothioate
  modified_base 17: mod_base = gm
  modified_base 17..18: mod_base = OTHER; note = S-phosphorothioate
  modified_base 18: mod_base = OTHER; note = 2-O-methylribose adenine
  modified_base 18..19: mod_base = OTHER; note = S-phosphorothioate
  modified_base 19: mod_base = cm
  modified_base 19..20: mod_base = OTHER; note = S-phosphorothioate
  modified_base 20: mod_base = cm
  modified_base 20..21: mod_base = OTHER; note = S-phosphorothioate
  modified_base 21: mod_base = OTHER; note = 2-O-methylribose adenine
  modified_base 21..22: mod_base = OTHER; note = S-phosphorothioate
  modified_base 22: mod_base = um
  modified_base 22..23: mod_base = OTHER; note = S-phosphorothioate
  modified_base 23: mod_base = cm
  modified_base 23..24: mod_base = OTHER; note = S-phosphorothioate
  modified_base 24: mod_base = OTHER; note = deoxyribose adenine
  modified_base 24..25: mod_base = OTHER; note = S-phosphorothioate
  modified_base 25: mod_base = OTHER; note = deoxyribose uracil (position 3 connectivity)
  modified_base 25..26: mod_base = OTHER; note = S-phosphorothioate
  modified_base 26: mod_base = OTHER; note = deoxyribose adenine
  modified_base 26..27: mod_base = OTHER; note R-N-(1,3-dimethylimidazolidin-2-ylidene)phosphoramidate
  modified_base 27: mod_base = gm
  modified_base 27..28: mod_base = OTHER; note = S-phosphorothioate
  modified_base 28: mod_base = OTHER; note = 2-fluororibose cytosine
  modified_base 28..29: mod_base = OTHER; note = S-phosphorothioate
  modified_base 29: mod_base = cm
  modified_base 29..30: mod_base = OTHER; note R-N-(1,3-dimethylimidazolidin-2-ylidene)phosphoramidate
  modified_base 30: mod_base = um
  source 1..30: mol_type = other RNA
ctgtccaggaacgtgtgaccatcatagcct

SEQ ID NO: 622 - RNA, 30 nt, synthetic construct
  misc_feature 1..30: note = Synthetic: WV-47579
  misc_feature 1..30: note = Synthetic: ADR-0102107
  modified_base 1: mod_base = OTHER; note = 2-fluororibose uracil
  modified_base 1..2: mod_base = OTHER; note R-N-(1,3-dimethylimidazolidin-2-ylidene)phosphoramidate
  modified_base 2: mod_base = OTHER; note = 2-fluororibose guanine
  modified_base 2..3: mod_base = OTHER; note = S-phosphorothioate
  modified_base 3: mod_base = OTHER; note = 2-fluororibose uracil
  modified_base 3..4: mod_base = OTHER; note = S-phosphorothioate
  modified_base 4: mod_base = OTHER; note = 2-fluororibose cytosine
  modified_base 4..5: mod_base = OTHER; note = S-phosphorothioate
  modified_base 5: mod_base = OTHER; note = 2-fluororibose cytosine
  modified_base 5..6: mod_base = OTHER; note = S-phosphorothioate
  modified_base 6: mod_base = OTHER; note = 2-fluororibose adenine
  modified_base 6..7: mod_base = OTHER; note = S-phosphorothioate
  modified_base 7: mod_base = OTHER; note = 2-fluororibose guanine
  modified_base 7..8: mod_base = OTHER; note = S-phosphorothioate
  modified_base 8: mod_base = OTHER; note = 2-fluororibose guanine
  modified_base 8..9: mod_base = OTHER; note = S-phosphorothioate
  modified_base 9: mod_base = OTHER; note = 2-fluororibose adenine
  modified_base 9..10: mod_base = OTHER; note = S-phosphorothioate
  modified_base 10: mod_base = OTHER; note = 2-fluororibose adenine
  modified_base 10..11: mod_base = OTHER; note = S-phosphorothioate
  modified_base 11: mod_base = OTHER; note = 2-fluororibose cytosine
  modified_base 11..12: mod_base = OTHER; note = S-phosphorothioate
  modified_base 12: mod_base = OTHER; note = 2-fluororibose guanine
  modified_base 12..13: mod_base = OTHER; note = S-phosphorothioate
  modified_base 13: mod_base = OTHER; note = 2-fluororibose uracil
  modified_base 13..14: mod_base = OTHER; note = S-phosphorothioate
  modified_base 14: mod_base = OTHER; note = 2-fluororibose guanine
  modified_base 14..15: mod_base = OTHER; note = S-phosphorothioate
  modified_base 15: mod_base = OTHER; note = 2-fluororibose uracil
  modified_base 15..16: mod_base = OTHER; note = S-phosphorothioate
  modified_base 16: mod_base = gm
  modified_base 16..17: mod_base = OTHER; note = S-phosphorothioate
  modified_base 17: mod_base = OTHER; note = 2-O-methylribose adenine
  modified_base 17..18: mod_base = OTHER; note = S-phosphorothioate
  modified_base 18: mod_base = cm
  modified_base 18..19: mod_base = OTHER; note = S-phosphorothioate
  modified_base 19: mod_base = cm
  modified_base 19..20: mod_base = OTHER; note = S-phosphorothioate
  modified_base 20: mod_base = OTHER; note = 2-O-methylribose adenine
  modified_base 20..21: mod_base = OTHER; note = S-phosphorothioate
  modified_base 21: mod_base = um
  modified_base 21..22: mod_base = OTHER; note = S-phosphorothioate
  modified_base 22: mod_base = cm
  modified_base 22..23: mod_base = OTHER; note = S-phosphorothioate
  modified_base 23: mod_base = OTHER; note = deoxyribose adenine
  modified_base 23..24: mod_base = OTHER; note = S-phosphorothioate
  modified_base 24: mod_base = OTHER; note = deoxyribose uracil (position 3 connectivity)
  modified_base 24..25: mod_base = OTHER; note = S-phosphorothioate
  modified_base 25: mod_base = OTHER; note = deoxyribose adenine
  modified_base 25..26: mod_base = OTHER; note R-N-(1,3-dimethylimidazolidin-2-ylidene)phosphoramidate
  modified_base 26: mod_base = gm
  modified_base 26..27: mod_base = OTHER; note = S-phosphorothioate
  modified_base 27: mod_base = OTHER; note = 2-fluororibose cytosine
  modified_base 27..28: mod_base = OTHER; note = S-phosphorothioate
  modified_base 28: mod_base = cm
  modified_base 28..29: mod_base = OTHER; note = S-phosphorothioate
  modified_base 29: mod_base = um
  modified_base 29..30: mod_base = OTHER; note R-N-(1,3-dimethylimidazolidin-2-ylidene)phosphoramidate
  modified_base 30: mod_base = cm
  source 1..30: mol_type = other RNA
tgtccaggaacgtgtgaccatcatagcctc

SEQ ID NO: 623 - RNA, 30 nt, synthetic construct
  misc_feature 1..30: note = Synthetic: WV-47565
  misc_feature 1..30: note = Synthetic: ADR-0102096
  modified_base 1: mod_base = OTHER; note = 2-fluororibose cytosine
  modified_base 1..2: mod_base = OTHER; note R-N-(1,3-dimethylimidazolidin-2-ylidene)phosphoramidate
  modified_base 2: mod_base = OTHER; note = 2-fluororibose uracil
  modified_base 2..3: mod_base = OTHER; note = S-phosphorothioate
  modified_base 3: mod_base = OTHER; note = 2-fluororibose guanine
  modified_base 3..4: mod_base = OTHER; note = S-phosphorothioate
  modified_base 4: mod_base = OTHER; note = 2-fluororibose uracil
  modified_base 4..5: mod_base = OTHER; note = S-phosphorothioate
  modified_base 5: mod_base = OTHER; note = 2-fluororibose uracil
  modified_base 5..6: mod_base = OTHER; note = S-phosphorothioate
  modified_base 6: mod_base = OTHER; note = 2-fluororibose cytosine
  modified_base 6..7: mod_base = OTHER; note = S-phosphorothioate
  modified_base 7: mod_base = OTHER; note = 2-fluororibose adenine
  modified_base 7..8: mod_base = OTHER; note = S-phosphorothioate
  modified_base 8: mod_base = OTHER; note = 2-fluororibose guanine
  modified_base 8..9: mod_base = OTHER; note = S-phosphorothioate
  modified_base 9: mod_base = OTHER; note = 2-fluororibose cytosine
  modified_base 9..10: mod_base = OTHER; note = S-phosphorothioate
  modified_base 10: mod_base = OTHER; note = 2-fluororibose uracil
  modified_base 10..11: mod_base = OTHER; note = S-phosphorothioate
  modified_base 11: mod_base = OTHER; note = 2-fluororibose guanine
  modified_base 11..12: mod_base = OTHER; note = S-phosphorothioate
  modified_base 12: mod_base = OTHER; note = 2-fluororibose guanine
  modified_base 12..13: mod_base = OTHER; note = S-phosphorothioate
  modified_base 13: mod_base = OTHER; note = 2-fluororibose uracil
  modified_base 13..14: mod_base = OTHER; note = S-phosphorothioate
  modified_base 14: mod_base = OTHER; note = 2-fluororibose cytosine
  modified_base 14..15: mod_base = OTHER; note = S-phosphorothioate
  modified_base 15: mod_base = OTHER; note = 2-fluororibose cytosine
  modified_base 15..16: mod_base = OTHER; note = S-phosphorothioate
  modified_base 16: mod_base = um
  modified_base 16..17: mod_base = OTHER; note = S-phosphorothioate
  modified_base 17: mod_base = gm
  modified_base 17..18: mod_base = OTHER; note = S-phosphorothioate
  modified_base 18: mod_base = OTHER; note = 2-O-methylribose adenine
  modified_base 18..19: mod_base = OTHER; note = S-phosphorothioate
  modified_base 19: mod_base = cm
  modified_base 19..20: mod_base = OTHER; note = S-phosphorothioate
  modified_base 20: mod_base = cm
  modified_base 20..21: mod_base = OTHER; note = S-phosphorothioate
  modified_base 21: mod_base = OTHER; note = 2-O-methylribose adenine
  modified_base 21..22: mod_base = OTHER; note = S-phosphorothioate
  modified_base 22: mod_base = um
  modified_base 22..23: mod_base = OTHER; note = S-phosphorothioate
  modified_base 23: mod_base = cm
  modified_base 23..24: mod_base = OTHER; note = S-phosphorothioate
  modified_base 24: mod_base = OTHER; note = deoxyribose adenine
  modified_base 24..25: mod_base = OTHER; note = S-phosphorothioate
  modified_base 25: mod_base = OTHER; note = deoxyribose uracil (position 3 connectivity)
  modified_base 25..26: mod_base = OTHER; note = S-phosphorothioate
  modified_base 26: mod_base = OTHER; note = deoxyribose adenine
  modified_base 26..27: mod_base = OTHER; note R-N-(1,3-dimethylimidazolidin-2-ylidene)phosphoramidate
  modified_base 27: mod_base = gm
  modified_base 27..28: mod_base = OTHER; note = S-phosphorothioate
  modified_base 28: mod_base = OTHER; note = 2-fluororibose cytosine
  modified_base 28..29: mod_base = OTHER; note = S-phosphorothioate
  modified_base 29: mod_base = cm
  modified_base 29..30: mod_base = OTHER; note R-N-(1,3-dimethylimidazolidin-2-ylidene)phosphoramidate
  modified_base 30: mod_base = cm
  source 1..30: mol_type = other RNA
ctgttcagctggtcctgaccatcatagccc

SEQ ID NO: 624 - RNA, 30 nt, synthetic construct
  misc_feature 1..30: note = Synthetic: WV-47577
  misc_feature 1..30: note = Synthetic: ADR-0102108
  modified_base 1: mod_base = OTHER; note = 2-fluororibose uracil
  modified_base 1..2: mod_base = OTHER; note R-N-(1,3-dimethylimidazolidin-2-ylidene)phosphoramidate
  modified_base 2: mod_base = OTHER; note = 2-fluororibose guanine
  modified_base 2..3: mod_base = OTHER; note = S-phosphorothioate
  modified_base 3: mod_base = OTHER; note = 2-fluororibose uracil
  modified_base 3..4: mod_base = OTHER; note = S-phosphorothioate
  modified_base 4: mod_base = OTHER; note = 2-fluororibose uracil
  modified_base 4..5: mod_base = OTHER; note = S-phosphorothioate
  modified_base 5: mod_base = OTHER; note = 2-fluororibose cytosine
  modified_base 5..6: mod_base = OTHER; note = S-phosphorothioate
  modified_base 6: mod_base = OTHER; note = 2-fluororibose adenine
  modified_base 6..7: mod_base = OTHER; note = S-phosphorothioate
  modified_base 7: mod_base = OTHER; note = 2-fluororibose guanine
  modified_base 7..8: mod_base = OTHER; note = S-phosphorothioate
  modified_base 8: mod_base = OTHER; note = 2-fluororibose cytosine
  modified_base 8..9: mod_base = OTHER; note = S-phosphorothioate
  modified_base 9: mod_base = OTHER; note = 2-fluororibose uracil
  modified_base 9..10: mod_base = OTHER; note = S-phosphorothioate
  modified_base 10: mod_base = OTHER; note = 2-fluororibose guanine
  modified_base 10..11: mod_base = OTHER; note = S-phosphorothioate
  modified_base 11: mod_base = OTHER; note = 2-fluororibose guanine
  modified_base 11..12: mod_base = OTHER; note = S-phosphorothioate
  modified_base 12: mod_base = OTHER; note = 2-fluororibose uracil
  modified_base 12..13: mod_base = OTHER; note = S-phosphorothioate
  modified_base 13: mod_base = OTHER; note = 2-fluororibose cytosine
  modified_base 13..14: mod_base = OTHER; note = S-phosphorothioate
  modified_base 14: mod_base = OTHER; note = 2-fluororibose cytosine
  modified_base 14..15: mod_base = OTHER; note = S-phosphorothioate
  modified_base 15: mod_base = OTHER; note = 2-fluororibose uracil
  modified_base 15..16: mod_base = OTHER; note = S-phosphorothioate
  modified_base 16: mod_base = gm
  modified_base 16..17: mod_base = OTHER; note = S-phosphorothioate
  modified_base 17: mod_base = OTHER; note = 2-O-methylribose adenine
  modified_base 17..18: mod_base = OTHER; note = S-phosphorothioate
  modified_base 18: mod_base = cm
  modified_base 18..19: mod_base = OTHER; note = S-phosphorothioate
  modified_base 19: mod_base = cm
  modified_base 19..20: mod_base = OTHER; note = S-phosphorothioate
  modified_base 20: mod_base = OTHER; note = 2-O-methylribose adenine
  modified_base 20..21: mod_base = OTHER; note = S-phosphorothioate
  modified_base 21: mod_base = um
  modified_base 21..22: mod_base = OTHER; note = S-phosphorothioate
  modified_base 22: mod_base = cm
  modified_base 22..23: mod_base = OTHER; note = S-phosphorothioate
  modified_base 23: mod_base = OTHER; note = deoxyribose adenine
  modified_base 23..24: mod_base = OTHER; note = S-phosphorothioate
  modified_base 24: mod_base = OTHER; note = deoxyribose uracil (position 3 connectivity)
  modified_base 24..25: mod_base = OTHER; note = S-phosphorothioate
  modified_base 25: mod_base = OTHER; note = deoxyribose adenine
  modified_base 25..26: mod_base = OTHER; note R-N-(1,3-dimethylimidazolidin-2-ylidene)phosphoramidate
  modified_base 26: mod_base = gm
  modified_base 26..27: mod_base = OTHER; note = S-phosphorothioate
  modified_base 27: mod_base = OTHER; note = 2-fluororibose cytosine
  modified_base 27..28: mod_base = OTHER; note = S-phosphorothioate
  modified_base 28: mod_base = cm
  modified_base 28..29: mod_base = OTHER; note = S-phosphorothioate
  modified_base 29: mod_base = cm
  modified_base 29..30: mod_base = OTHER; note R-N-(1,3-dimethylimidazolidin-2-ylidene)phosphoramidate
  modified_base 30: mod_base = cm
  source 1..30: mol_type = other RNA
tgttcagctggtcctgaccatcatagcccc

SEQ ID NO: 625 - RNA, 30 nt, synthetic construct
  misc_feature 1..30: note = Synthetic: WV-47576
  misc_feature 1..30: note = Synthetic: ADR-0102091
  modified_base 1: mod_base = OTHER; note = 2-fluororibose cytosine
  modified_base 1..2: mod_base = OTHER; note R-N-(1,3-dimethylimidazolidin-2-ylidene)phosphoramidate
  modified_base 2: mod_base = OTHER; note = 2-fluororibose adenine
  modified_base 2..3: mod_base = OTHER; note = S-phosphorothioate
  modified_base 3: mod_base = OTHER; note = 2-fluororibose guanine
  modified_base 3..4: mod_base = OTHER; note = S-phosphorothioate
  modified_base 4: mod_base = OTHER; note = 2-fluororibose guanine
  modified_base 4..5: mod_base = OTHER; note = S-phosphorothioate
  modified_base 5: mod_base = OTHER; note = 2-fluororibose adenine
  modified_base 5..6: mod_base = OTHER; note = S-phosphorothioate
  modified_base 6: mod_base = OTHER; note = 2-fluororibose cytosine
  modified_base 6..7: mod_base = OTHER; note = S-phosphorothioate
  modified_base 7: mod_base = OTHER; note = 2-fluororibose guanine
  modified_base 7..8: mod_base = OTHER; note = S-phosphorothioate
  modified_base 8: mod_base = OTHER; note = 2-fluororibose cytosine
  modified_base 8..9: mod_base = OTHER; note = S-phosphorothioate
  modified_base 9: mod_base = OTHER; note = 2-fluororibose adenine
  modified_base 9..10: mod_base = OTHER; note = S-phosphorothioate
  modified_base 10: mod_base = OTHER; note = 2-fluororibose guanine
  modified_base 10..11: mod_base = OTHER; note = S-phosphorothioate
  modified_base 11: mod_base = OTHER; note = 2-fluororibose adenine
  modified_base 11..12: mod_base = OTHER; note = S-phosphorothioate
  modified_base 12: mod_base = OTHER; note = 2-fluororibose cytosine
  modified_base 12..13: mod_base = OTHER; note = S-phosphorothioate
  modified_base 13: mod_base = OTHER; note = 2-fluororibose guanine
  modified_base 13..14: mod_base = OTHER; note = S-phosphorothioate
  modified_base 14: mod_base = OTHER; note = 2-fluororibose cytosine
  modified_base 14..15: mod_base = OTHER; note = S-phosphorothioate
  modified_base 15: mod_base = OTHER; note = 2-fluororibose cytosine
  modified_base 15..16: mod_base = OTHER; note = S-phosphorothioate
  modified_base 16: mod_base = um
  modified_base 16..17: mod_base = OTHER; note = S-phosphorothioate
  modified_base 17: mod_base = gm
  modified_base 17..18: mod_base = OTHER; note = S-phosphorothioate
  modified_base 18: mod_base = cm
  modified_base 18..19: mod_base = OTHER; note = S-phosphorothioate
  modified_base 19: mod_base = cm
  modified_base 19..20: mod_base = OTHER; note = S-phosphorothioate
  modified_base 20: mod_base = cm
  modified_base 20..21: mod_base = OTHER; note = S-phosphorothioate
  modified_base 21: mod_base = cm
  modified_base 21..22: mod_base = OTHER; note = S-phosphorothioate
  modified_base 22: mod_base = gm
  modified_base 22..23: mod_base = OTHER; note = S-phosphorothioate
  modified_base 23: mod_base = OTHER; note = deoxyribose cytosine
  modified_base 23..24: mod_base = OTHER; note = S-phosphorothioate
  modified_base 24: mod_base = OTHER; note = deoxyribose uracil (position 3 connectivity)
  modified_base 24..25: mod_base = OTHER; note = S-phosphorothioate
  modified_base 25: mod_base = OTHER; note = deoxyribose thymine
  modified_base 25..26: mod_base = OTHER; note R-N-(1,3-dimethylimidazolidin-2-ylidene)phosphoramidate
  modified_base 26: mod_base = cm
  modified_base 26..27: mod_base = OTHER; note = S-phosphorothioate
  modified_base 27: mod_base = OTHER; note = 2-fluororibose guanine
  modified_base 27..28: mod_base = OTHER; note = S-phosphorothioate
  modified_base 28: mod_base = gm
  modified_base 28..29: mod_base = OTHER; note = S-phosphorothioate
  modified_base 29: mod_base = OTHER; note = 2-O-methylribose adenine
  modified_base 29..30: mod_base = OTHER; note R-N-(1,3-dimethylimidazolidin-2-ylidene)phosphoramidate
  modified_base 30: mod_base = um
  source 1..30: mol_type = other RNA
caggacgcagacgcctgccccgcttcggat

SEQ ID NO: 626 - RNA, 30 nt, synthetic construct
  misc_feature 1..30: note = Synthetic: WV-47575
  misc_feature 1..30: note = Synthetic: ADR-0102092
  modified_base 1: mod_base = OTHER; note = 2-fluororibose cytosine
  modified_base 1..2: mod_base = OTHER; note R-N-(1,3-dimethylimidazolidin-2-ylidene)phosphoramidate
  modified_base 2: mod_base = OTHER; note = 2-fluororibose adenine
  modified_base 2..3: mod_base = OTHER; note = S-phosphorothioate
  modified_base 3: mod_base = OTHER; note = 2-fluororibose uracil
  modified_base 3..4: mod_base = OTHER; note = S-phosphorothioate
  modified_base 4: mod_base = OTHER; note = 2-fluororibose adenine
  modified_base 4..5: mod_base = OTHER; note = S-phosphorothioate
  modified_base 5: mod_base = OTHER; note = 2-fluororibose cytosine
  modified_base 5..6: mod_base = OTHER; note = S-phosphorothioate
  modified_base 6: mod_base = OTHER; note = 2-fluororibose cytosine
  modified_base 6..7: mod_base = OTHER; note = S-phosphorothioate
  modified_base 7: mod_base = OTHER; note = 2-fluororibose uracil
  modified_base 7..8: mod_base = OTHER; note = S-phosphorothioate
  modified_base 8: mod_base = OTHER; note = 2-fluororibose cytosine
  modified_base 8..9: mod_base = OTHER; note = S-phosphorothioate
  modified_base 9: mod_base = OTHER; note = 2-fluororibose uracil
  modified_base 9..10: mod_base = OTHER; note = S-phosphorothioate
  modified_base 10: mod_base = OTHER; note = 2-fluororibose cytosine
  modified_base 10..11: mod_base = OTHER; note = S-phosphorothioate
  modified_base 11: mod_base = OTHER; note = 2-fluororibose cytosine
  modified_base 11..12: mod_base = OTHER; note = S-phosphorothioate
  modified_base 12: mod_base = OTHER; note = 2-fluororibose adenine
  modified_base 12..13: mod_base = OTHER; note = S-phosphorothioate
  modified_base 13: mod_base = OTHER; note = 2-fluororibose cytosine
  modified_base 13..14: mod_base = OTHER; note = S-phosphorothioate
  modified_base 14: mod_base = OTHER; note = 2-fluororibose adenine
  modified_base 14..15: mod_base = OTHER; note = S-phosphorothioate
  modified_base 15: mod_base = OTHER; note = 2-fluororibose cytosine
  modified_base 15..16: mod_base = OTHER; note = S-phosphorothioate
  modified_base 16: mod_base = um
  modified_base 16..17: mod_base = OTHER; note = S-phosphorothioate
  modified_base 17: mod_base = gm
  modified_base 17..18: mod_base = OTHER; note = S-phosphorothioate
  modified_base 18: mod_base = um
  modified_base 18..19: mod_base = OTHER; note = S-phosphorothioate
  modified_base 19: mod_base = um
  modified_base 19..20: mod_base = OTHER; note = S-phosphorothioate
  modified_base 20: mod_base = gm
  modified_base 20..21: mod_base = OTHER; note = S-phosphorothioate
  modified_base 21: mod_base = um
  modified_base 21..22: mod_base = OTHER; note = S-phosphorothioate
  modified_base 22: mod_base = gm
  modified_base 22..23: mod_base = OTHER; note = S-phosphorothioate
  modified_base 23: mod_base = OTHER; note = deoxyribose guanine
  modified_base 23..24: mod_base = OTHER; note = S-phosphorothioate
  modified_base 24: mod_base = OTHER; note = deoxyribose uracil (position 3 connectivity)
  modified_base 24..25: mod_base = OTHER; note = S-phosphorothioate
  modified_base 25: mod_base = OTHER; note = deoxyribose inosine
  modified_base 25..26: mod_base = OTHER; note S-N-(1,3-dimethylimidazolidin-2-ylidene)phosphoramidate
  modified_base 26: mod_base = gm
  modified_base 26..27: mod_base = OTHER; note = S-phosphorothioate
  modified_base 27: mod_base = OTHER; note = 2-fluororibose adenine
  modified_base 27..28: mod_base = OTHER; note = S-phosphorothioate
  modified_base 28: mod_base = um
  modified_base 28..29: mod_base = OTHER; note = S-phosphorothioate
  modified_base 29: mod_base = gm
  modified_base 29..30: mod_base = OTHER; note R-N-(1,3-dimethylimidazolidin-2-ylidene)phosphoramidate
  modified_base 30: mod_base = cm
  source 1..30: mol_type = other RNA
catacctctccacactgttgtggtggatgc

SEQ ID NO: 627 - RNA, 30 nt, synthetic construct
  misc_feature 1..30: note = Synthetic: WV-47570
  misc_feature 1..30: note = Synthetic: ADR-0102087
  modified_base 1: mod_base = OTHER; note = 2-fluororibose adenine
  modified_base 1..2: mod_base = OTHER; note R-N-(1,3-dimethylimidazolidin-2-ylidene)phosphoramidate
  modified_base 2: mod_base = OTHER; note = 2-fluororibose cytosine
  modified_base 2..3: mod_base = OTHER; note = S-phosphorothioate
  modified_base 3: mod_base = OTHER; note = 2-fluororibose uracil
  modified_base 3..4: mod_base = OTHER; note = S-phosphorothioate
  modified_base 4: mod_base = OTHER; note = 2-fluororibose cytosine
  modified_base 4..5: mod_base = OTHER; note = S-phosphorothioate
  modified_base 5: mod_base = OTHER; note = 2-fluororibose adenine
  modified_base 5..6: mod_base = OTHER; note = S-phosphorothioate
  modified_base 6: mod_base = OTHER; note = 2-fluororibose cytosine
  modified_base 6..7: mod_base = OTHER; note = S-phosphorothioate
  modified_base 7: mod_base = OTHER; note = 2-fluororibose cytosine
  modified_base 7..8: mod_base = OTHER; note = S-phosphorothioate
  modified_base 8: mod_base = OTHER; note = 2-fluororibose uracil
  modified_base 8..9: mod_base = OTHER; note = S-phosphorothioate
  modified_base 9: mod_base = OTHER; note = 2-fluororibose cytosine
  modified_base 9..10: mod_base = OTHER; note = S-phosphorothioate
  modified_base 10: mod_base = OTHER; note = 2-fluororibose uracil
  modified_base 10..11: mod_base = OTHER; note = S-phosphorothioate
  modified_base 11: mod_base = OTHER; note = 2-fluororibose cytosine
  modified_base 11..12: mod_base = OTHER; note = S-phosphorothioate
  modified_base 12: mod_base = OTHER; note = 2-fluororibose cytosine
  modified_base 12..13: mod_base = OTHER; note = S-phosphorothioate
  modified_base 13: mod_base = OTHER; note = 2-fluororibose adenine
  modified_base 13..14: mod_base = OTHER; note = S-phosphorothioate
  modified_base 14: mod_base = OTHER; note = 2-fluororibose cytosine
  modified_base 14..15: mod_base = OTHER; note = S-phosphorothioate
  modified_base 15: mod_base = OTHER; note = 2-fluororibose adenine
  modified_base 15..16: mod_base = OTHER; note = S-phosphorothioate
  modified_base 16: mod_base = cm
  modified_base 16..17: mod_base = OTHER; note = S-phosphorothioate
  modified_base 17: mod_base = um
  modified_base 17..18: mod_base = OTHER; note = S-phosphorothioate
  modified_base 18: mod_base = gm
  modified_base 18..19: mod_base = OTHER; note = S-phosphorothioate
  modified_base 19: mod_base = um
  modified_base 19..20: mod_base = OTHER; note = S-phosphorothioate
  modified_base 20: mod_base = um
  modified_base 20..21: mod_base = OTHER; note = S-phosphorothioate
  modified_base 21: mod_base = gm
  modified_base 21..22: mod_base = OTHER; note = S-phosphorothioate
  modified_base 22: mod_base = um
  modified_base 22..23: mod_base = OTHER; note = S-phosphorothioate
  modified_base 23: mod_base = gm
  modified_base 23..24: mod_base = OTHER; note = S-phosphorothioate
  modified_base 24: mod_base = OTHER; note = deoxyribose guanine
  modified_base 24..25: mod_base = OTHER; note = S-phosphorothioate
  modified_base 25: mod_base = OTHER; note = deoxyribose uracil (position 3 connectivity)
  modified_base 25..26: mod_base = OTHER; note = S-phosphorothioate
  modified_base 26: mod_base = OTHER; note = deoxyribose inosine
  modified_base 26..27: mod_base = OTHER; note S-N-(1,3-dimethylimidazolidin-2-ylidene)phosphoramidate
  modified_base 27: mod_base = gm
  modified_base 27..28: mod_base = OTHER; note = S-phosphorothioate
  modified_base 28: mod_base = OTHER; note = 2-fluororibose adenine
  modified_base 28..29: mod_base = OTHER; note = S-phosphorothioate
  modified_base 29: mod_base = um
  modified_base 29..30: mod_base = OTHER; note R-N-(1,3-dimethylimidazolidin-2-ylidene)phosphoramidate
  modified_base 30: mod_base = gm
  source 1..30: mol_type = other RNA
actcacctctccacactgttgtggtggatg

SEQ ID NO: 628 - RNA, 30 nt, synthetic construct
  misc_feature 1..30: note = Synthetic: WV-47562
  misc_feature 1..30: note = Synthetic: ADR-0102097
  modified_base 1: mod_base = OTHER; note = 2-fluororibose guanine
  modified_base 1..2: mod_base = OTHER; note R-N-(1,3-dimethylimidazolidin-2-ylidene)phosphoramidate
  modified_base 2: mod_base = OTHER; note = 2-fluororibose adenine
  modified_base 2..3: mod_base = OTHER; note = S-phosphorothioate
  modified_base 3: mod_base = OTHER; note = 2-fluororibose guanine
  modified_base 3..4: mod_base = OTHER; note = S-phosphorothioate
  modified_base 4: mod_base = OTHER; note = 2-fluororibose uracil
  modified_base 4..5: mod_base = OTHER; note = S-phosphorothioate
  modified_base 5: mod_base = OTHER; note = 2-fluororibose cytosine
  modified_base 5..6: mod_base = OTHER; note = S-phosphorothioate
  modified_base 6: mod_base = OTHER; note = 2-fluororibose guanine
  modified_base 6..7: mod_base = OTHER; note = S-phosphorothioate
  modified_base 7: mod_base = OTHER; note = 2-fluororibose guanine
  modified_base 7..8: mod_base = OTHER; note = S-phosphorothioate
  modified_base 8: mod_base = OTHER; note = 2-fluororibose uracil
  modified_base 8..9: mod_base = OTHER; note = S-phosphorothioate
  modified_base 9: mod_base = OTHER; note = 2-fluororibose guanine
  modified_base 9..10: mod_base = OTHER; note = S-phosphorothioate
  modified_base 10: mod_base = OTHER; note = 2-fluororibose uracil
  modified_base 10..11: mod_base = OTHER; note = S-phosphorothioate
  modified_base 11: mod_base = OTHER; note = 2-fluororibose uracil
  modified_base 11..12: mod_base = OTHER; note = S-phosphorothioate
  modified_base 12: mod_base = OTHER; note = 2-fluororibose guanine
  modified_base 12..13: mod_base = OTHER; note = S-phosphorothioate
  modified_base 13: mod_base = OTHER; note = 2-fluororibose cytosine
  modified_base 13..14: mod_base = OTHER; note = S-phosphorothioate
  modified_base 14: mod_base = OTHER; note = 2-fluororibose cytosine
  modified_base 14..15: mod_base = OTHER; note = S-phosphorothioate
  modified_base 15: mod_base = OTHER; note = 2-fluororibose guanine
  modified_base 15..16: mod_base = OTHER; note = S-phosphorothioate
  modified_base 16: mod_base = um
  modified_base 16..17: mod_base = OTHER; note = S-phosphorothioate
  modified_base 17: mod_base = cm
  modified_base 17..18: mod_base = OTHER; note = S-phosphorothioate
  modified_base 18: mod_base = gm
  modified_base 18..19: mod_base = OTHER; note = S-phosphorothioate
  modified_base 19: mod_base = gm
  modified_base 19..20: mod_base = OTHER; note = S-phosphorothioate
  modified_base 20: mod_base = gm
  modified_base 20..21: mod_base = OTHER; note = S-phosphorothioate
  modified_base 21: mod_base = cm
  modified_base 21..22: mod_base = OTHER; note = S-phosphorothioate
  modified_base 22: mod_base = gm
  modified_base 22..23: mod_base = OTHER; note = S-phosphorothioate
  modified_base 23: mod_base = OTHER; note = 2-O-methylribose adenine
  modified_base 23..24: mod_base = OTHER; note = S-phosphorothioate
  modified_base 24: mod_base = OTHER; note = deoxyribose guanine
  modified_base 24..25: mod_base = OTHER; note = S-phosphorothioate
  modified_base 25: mod_base = OTHER; note = deoxyribose uracil (position 3 connectivity)
  modified_base 25..26: mod_base = OTHER; note = S-phosphorothioate
  modified_base 26: mod_base = OTHER; note = deoxyribose thymine
  modified_base 26..27: mod_base = OTHER; note R-N-(1,3-dimethylimidazolidin-2-ylidene)phosphoramidate
  modified_base 27: mod_base = gm
  modified_base 27..28: mod_base = OTHER; note = S-phosphorothioate
  modified_base 28: mod_base = OTHER; note = 2-fluororibose uracil
  modified_base 28..29: mod_base = OTHER; note = S-phosphorothioate
  modified_base 29: mod_base = um
  modified_base 29..30: mod_base = OTHER; note R-N-(1,3-dimethylimidazolidin-2-ylidene)phosphoramidate
  modified_base 30: mod_base = cm
  source 1..30: mol_type = other RNA
gagtcggtgttgccgtcgggcgagttgttc

SEQ ID NO: 629 - RNA, 30 nt, synthetic construct
  misc_feature 1..30: note = Synthetic: WV-47561
  misc_feature 1..30: note = Synthetic: ADR-0102090
  modified_base 1: mod_base = OTHER; note = 2-fluororibose adenine
  modified_base 1..2: mod_base = OTHER; note R-N-(1,3-dimethylimidazolidin-2-ylidene)phosphoramidate
  modified_base 2: mod_base = OTHER; note = 2-fluororibose guanine
  modified_base 2..3: mod_base = OTHER; note = S-phosphorothioate
  modified_base 3: mod_base = OTHER; note = 2-fluororibose uracil
  modified_base 3..4: mod_base = OTHER; note = S-phosphorothioate
  modified_base 4: mod_base = OTHER; note = 2-fluororibose cytosine
  modified_base 4..5: mod_base = OTHER; note = S-phosphorothioate
  modified_base 5: mod_base = OTHER; note = 2-fluororibose guanine
  modified_base 5..6: mod_base = OTHER; note = S-phosphorothioate
  modified_base 6: mod_base = OTHER; note = 2-fluororibose guanine
  modified_base 6..7: mod_base = OTHER; note = S-phosphorothioate
  modified_base 7: mod_base = OTHER; note = 2-fluororibose uracil
  modified_base 7..8: mod_base = OTHER; note = S-phosphorothioate
  modified_base 8: mod_base = OTHER; note = 2-fluororibose guanine
  modified_base 8..9: mod_base = OTHER; note = S-phosphorothioate
  modified_base 9: mod_base = OTHER; note = 2-fluororibose uracil
  modified_base 9..10: mod_base = OTHER; note = S-phosphorothioate
  modified_base 10: mod_base = OTHER; note = 2-fluororibose uracil
  modified_base 10..11: mod_base = OTHER; note = S-phosphorothioate
  modified_base 11: mod_base = OTHER; note = 2-fluororibose guanine
  modified_base 11..12: mod_base = OTHER; note = S-phosphorothioate
  modified_base 12: mod_base = OTHER; note = 2-fluororibose cytosine
  modified_base 12..13: mod_base = OTHER; note = S-phosphorothioate
  modified_base 13: mod_base = OTHER; note = 2-fluororibose cytosine
  modified_base 13..14: mod_base = OTHER; note = S-phosphorothioate
  modified_base 14: mod_base = OTHER; note = 2-fluororibose guanine
  modified_base 14..15: mod_base = OTHER; note = S-phosphorothioate
  modified_base 15: mod_base = OTHER; note = 2-fluororibose uracil
  modified_base 15..16: mod_base = OTHER; note = S-phosphorothioate
  modified_base 16: mod_base = cm
  modified_base 16..17: mod_base = OTHER; note = S-phosphorothioate
  modified_base 17: mod_base = gm
  modified_base 17..18: mod_base = OTHER; note = S-phosphorothioate
  modified_base 18: mod_base = gm
  modified_base 18..19: mod_base = OTHER; note = S-phosphorothioate
  modified_base 19: mod_base = gm
  modified_base 19..20: mod_base = OTHER; note = S-phosphorothioate
  modified_base 20: mod_base = cm
  modified_base 20..21: mod_base = OTHER; note = S-phosphorothioate
  modified_base 21: mod_base = gm
  modified_base 21..22: mod_base = OTHER; note = S-phosphorothioate
  modified_base 22: mod_base = OTHER; note = 2-O-methylribose adenine
  modified_base 22..23: mod_base = OTHER; note = S-phosphorothioate
  modified_base 23: mod_base = gm
  modified_base 23..24: mod_base = OTHER; note = S-phosphorothioate
  modified_base 24: mod_base = OTHER; note = deoxyribose thymine
  modified_base 24..25: mod_base = OTHER; note = S-phosphorothioate
  modified_base 25: mod_base = OTHER; note = deoxyribose uracil (position 3 connectivity)
  modified_base 25..26: mod_base = OTHER; note = S-phosphorothioate
  modified_base 26: mod_base = OTHER; note = deoxyribose inosine
  modified_base 26..27: mod_base = OTHER; note S-N-(1,3-dimethylimidazolidin-2-ylidene)phosphoramidate
  modified_base 27: mod_base = um
  modified_base 27..28: mod_base = OTHER; note = S-phosphorothioate
  modified_base 28: mod_base = OTHER; note = 2-fluororibose uracil
  modified_base 28..29: mod_base = OTHER; note = S-phosphorothioate
  modified_base 29: mod_base = cm
  modified_base 29..30: mod_base = OTHER; note R-N-(1,3-dimethylimidazolidin-2-ylidene)phosphoramidate
  modified_base 30: mod_base = cm
  source 1..30: mol_type = other RNA
agtcggtgttgccgtcgggcgagttgttcc

SEQ ID NO: 630 - RNA, 30 nt, synthetic construct; identical to SEQ ID NO: 629
  misc_feature 1..30: note = Synthetic: WV-47574
  misc_feature 1..30: note = Synthetic: ADR-0102089
  modified_base 1: mod_base = OTHER; note = 2-fluororibose adenine
  modified_base 1..2: mod_base = OTHER; note R-N-(1,3-dimethylimidazolidin-2-ylidene)phosphoramidate
  modified_base 2: mod_base = OTHER; note = 2-fluororibose guanine
  modified_base 2..3: mod_base = OTHER; note = S-phosphorothioate
  modified_base 3: mod_base = OTHER; note = 2-fluororibose uracil
  modified_base 3..4: mod_base = OTHER; note = S-phosphorothioate
  modified_base 4: mod_base = OTHER; note = 2-fluororibose cytosine
  modified_base 4..5: mod_base = OTHER; note = S-phosphorothioate
  modified_base 5: mod_base = OTHER; note = 2-fluororibose guanine
  modified_base 5..6: mod_base = OTHER; note = S-phosphorothioate
  modified_base 6: mod_base = OTHER; note = 2-fluororibose guanine
  modified_base 6..7: mod_base = OTHER; note = S-phosphorothioate
  modified_base 7: mod_base = OTHER; note = 2-fluororibose uracil
  modified_base 7..8: mod_base = OTHER; note = S-phosphorothioate
  modified_base 8: mod_base = OTHER; note = 2-fluororibose guanine
  modified_base 8..9: mod_base = OTHER; note = S-phosphorothioate
  modified_base 9: mod_base = OTHER; note = 2-fluororibose uracil
  modified_base 9..10: mod_base = OTHER; note = S-phosphorothioate
  modified_base 10: mod_base = OTHER; note = 2-fluororibose uracil
  modified_base 10..11: mod_base = OTHER; note = S-phosphorothioate
  modified_base 11: mod_base = OTHER; note = 2-fluororibose guanine
  modified_base 11..12: mod_base = OTHER; note = S-phosphorothioate
  modified_base 12: mod_base = OTHER; note = 2-fluororibose cytosine
  modified_base 12..13: mod_base = OTHER; note = S-phosphorothioate
  modified_base 13: mod_base = OTHER; note = 2-fluororibose cytosine
  modified_base 13..14: mod_base = OTHER; note = S-phosphorothioate
  modified_base 14: mod_base = OTHER; note = 2-fluororibose guanine
  modified_base 14..15: mod_base = OTHER; note = S-phosphorothioate
  modified_base 15: mod_base = OTHER; note = 2-fluororibose uracil
  modified_base 15..16: mod_base = OTHER; note = S-phosphorothioate
  modified_base 16: mod_base = cm
  modified_base 16..17: mod_base = OTHER; note = S-phosphorothioate
  modified_base 17: mod_base = gm
  modified_base 17..18: mod_base = OTHER; note = S-phosphorothioate
  modified_base 18: mod_base = gm
  modified_base 18..19: mod_base = OTHER; note = S-phosphorothioate
  modified_base 19: mod_base = gm
  modified_base 19..20: mod_base = OTHER; note = S-phosphorothioate
  modified_base 20: mod_base = cm
  modified_base 20..21: mod_base = OTHER; note = S-phosphorothioate
  modified_base 21: mod_base = gm
  modified_base 21..22: mod_base = OTHER; note = S-phosphorothioate
  modified_base 22: mod_base = OTHER; note = 2-O-methylribose adenine
  modified_base 22..23: mod_base = OTHER; note = S-phosphorothioate
  modified_base 23: mod_base = OTHER; note = deoxyribose guanine
  modified_base 23..24: mod_base = OTHER; note = S-phosphorothioate
  modified_base 24: mod_base = OTHER; note = deoxyribose uracil (position 3 connectivity)
  modified_base 24..25: mod_base = OTHER; note = S-phosphorothioate
  modified_base 25: mod_base = OTHER; note = deoxyribose thymine
  modified_base 25..26: mod_base = OTHER; note R-N-(1,3-dimethylimidazolidin-2-ylidene)phosphoramidate
  modified_base 26: mod_base = gm
  modified_base 26..27: mod_base = OTHER; note = S-phosphorothioate
  modified_base 27: mod_base = OTHER; note = 2-fluororibose uracil
  modified_base 27..28: mod_base = OTHER; note = S-phosphorothioate
  modified_base 28: mod_base = um
  modified_base 28..29: mod_base = OTHER; note = S-phosphorothioate
  modified_base 29: mod_base = cm
  modified_base 29..30: mod_base = OTHER; note R-N-(1,3-dimethylimidazolidin-2-ylidene)phosphoramidate
  modified_base 30: mod_base = cm
  source 1..30: mol_type = other RNA

SEQ ID NO: 631 - RNA, 30 nt, synthetic construct
  misc_feature 1..30: note = Synthetic: WV-47573
  misc_feature 1..30: note = Synthetic: ADR-0102102
  modified_base 1: mod_base = OTHER; note = 2-fluororibose guanine
  modified_base 1..2: mod_base = OTHER; note R-N-(1,3-dimethylimidazolidin-2-ylidene)phosphoramidate
  modified_base 2: mod_base = OTHER; note = 2-fluororibose uracil
  modified_base 2..3: mod_base = OTHER; note = S-phosphorothioate
  modified_base 3: mod_base = OTHER; note = 2-fluororibose cytosine
  modified_base 3..4: mod_base = OTHER; note = S-phosphorothioate
  modified_base 4: mod_base = OTHER; note = 2-fluororibose guanine
  modified_base 4..5: mod_base = OTHER; note = S-phosphorothioate
  modified_base 5: mod_base = OTHER; note = 2-fluororibose guanine
  modified_base 5..6: mod_base = OTHER; note = S-phosphorothioate
  modified_base 6: mod_base = OTHER; note = 2-fluororibose uracil
  modified_base 6..7: mod_base = OTHER; note = S-phosphorothioate
  modified_base 7: mod_base = OTHER; note = 2-fluororibose guanine
  modified_base 7..8: mod_base = OTHER; note = S-phosphorothioate
  modified_base 8: mod_base = OTHER; note = 2-fluororibose uracil
  modified_base 8..9: mod_base = OTHER; note = S-phosphorothioate
  modified_base 9: mod_base = OTHER; note = 2-fluororibose uracil
  modified_base 9..10: mod_base = OTHER; note = S-phosphorothioate
  modified_base 10: mod_base = OTHER; note = 2-fluororibose guanine
  modified_base 10..11: mod_base = OTHER; note = S-phosphorothioate
  modified_base 11: mod_base = OTHER; note = 2-fluororibose cytosine
  modified_base 11..12: mod_base = OTHER; note = S-phosphorothioate
  modified_base 12: mod_base = OTHER; note = 2-fluororibose cytosine
  modified_base 12..13: mod_base = OTHER; note = S-phosphorothioate
  modified_base 13: mod_base = OTHER; note = 2-fluororibose guanine
  modified_base 13..14: mod_base = OTHER; note = S-phosphorothioate
  modified_base 14: mod_base = OTHER; note = 2-fluororibose uracil
  modified_base 14..15: mod_base = OTHER; note = S-phosphorothioate
  modified_base 15: mod_base = OTHER; note = 2-fluororibose cytosine
  modified_base 15..16: mod_base = OTHER; note = S-phosphorothioate
  modified_base 16: mod_base = gm
  modified_base 16..17: mod_base = OTHER; note = S-phosphorothioate
  modified_base 17: mod_base = gm
  modified_base 17..18: mod_base = OTHER; note = S-phosphorothioate
  modified_base 18: mod_base = gm
  modified_base 18..19: mod_base = OTHER; note = S-phosphorothioate
  modified_base 19: mod_base = cm
  modified_base 19..20: mod_base = OTHER; note = S-phosphorothioate
  modified_base 20: mod_base = gm
  modified_base 20..21: mod_base = OTHER; note = S-phosphorothioate
  modified_base 21: mod_base = OTHER; note = 2-O-methylribose adenine
  modified_base 21..22: mod_base = OTHER; note = S-phosphorothioate
  modified_base 22: mod_base = gm
  modified_base 22..23: mod_base = OTHER; note = S-phosphorothioate
  modified_base 23: mod_base = OTHER; note = deoxyribose thymine
  modified_base 23..24: mod_base = OTHER; note = S-phosphorothioate
  modified_base 24: mod_base = OTHER; note = deoxyribose uracil (position 3 connectivity)
  modified_base 24..25: mod_base = OTHER; note = S-phosphorothioate
  modified_base 25: mod_base = OTHER; note = deoxyribose inosine
  modified_base 25..26: mod_base = OTHER; note S-N-(1,3-dimethylimidazolidin-2-ylidene)phosphoramidate
  modified_base 26: mod_base = um
  modified_base 26..27: mod_base = OTHER; note = S-phosphorothioate
  modified_base 27: mod_base = OTHER; note = 2-fluororibose uracil
  modified_base 27..28: mod_base = OTHER; note = S-phosphorothioate
  modified_base 28: mod_base = cm
  modified_base 28..29: mod_base = OTHER; note = S-phosphorothioate
  modified_base 29: mod_base = cm
  modified_base 29..30: mod_base = OTHER; note R-N-(1,3-dimethylimidazolidin-2-ylidene)phosphoramidate
  modified_base 30: mod_base = um
  source 1..30: mol_type = other RNA
gtcggtgttgccgtcgggcgagttgttcct

SEQ ID NO: 632 - RNA, 30 nt, synthetic construct
  misc_feature 1..30: note = Synthetic: WV-47560
  misc_feature 1..30: note = Synthetic: ADR-0102109
  modified_base 1: mod_base = OTHER; note = 2-fluororibose uracil
  modified_base 1..2: mod_base = OTHER; note R-N-(1,3-dimethylimidazolidin-2-ylidene)phosphoramidate
  modified_base 2: mod_base = OTHER; note = 2-fluororibose guanine
  modified_base 2..3: mod_base = OTHER; note = S-phosphorothioate
  modified_base 3: mod_base = OTHER; note = 2-fluororibose uracil
  modified_base 3..4: mod_base = OTHER; note = S-phosphorothioate
  modified_base 4: mod_base = OTHER; note = 2-fluororibose uracil
  modified_base 4..5: mod_base = OTHER; note = S-phosphorothioate
  modified_base 5: mod_base = OTHER; note = 2-fluororibose guanine
  modified_base 5..6: mod_base = OTHER; note = S-phosphorothioate
  modified_base 6: mod_base = OTHER; note = 2-fluororibose cytosine
  modified_base 6..7: mod_base = OTHER; note = S-phosphorothioate
  modified_base 7: mod_base = OTHER; note = 2-fluororibose cytosine
  modified_base 7..8: mod_base = OTHER; note = S-phosphorothioate
  modified_base 8: mod_base = OTHER; note = 2-fluororibose guanine
  modified_base 8..9: mod_base = OTHER; note = S-phosphorothioate
  modified_base 9: mod_base = OTHER; note = 2-fluororibose uracil
  modified_base 9..10: mod_base = OTHER; note = S-phosphorothioate
  modified_base 10: mod_base = OTHER; note = 2-fluororibose cytosine
  modified_base 10..11: mod_base = OTHER; note = S-phosphorothioate
  modified_base 11: mod_base = OTHER; note = 2-fluororibose guanine
  modified_base 11..12: mod_base = OTHER; note = S-phosphorothioate
  modified_base 12: mod_base = OTHER; note = 2-fluororibose guanine
  modified_base 12..13: mod_base = OTHER; note = S-phosphorothioate
  modified_base 13: mod_base = OTHER; note = 2-fluororibose guanine
  modified_base 13..14: mod_base = OTHER; note = S-phosphorothioate
  modified_base 14: mod_base = OTHER; note = 2-fluororibose cytosine
  modified_base 14..15: mod_base = OTHER; note = S-phosphorothioate
  modified_base 15: mod_base = OTHER; note = 2-fluororibose guanine
  modified_base 15..16: mod_base = OTHER; note = S-phosphorothioate
  modified_base 16: mod_base = OTHER; note = 2-O-methylribose adenine
  modified_base 16..17: mod_base = OTHER; note = S-phosphorothioate
  modified_base 17: mod_base = gm
  modified_base 17..18: mod_base = OTHER; note = S-phosphorothioate
  modified_base 18: mod_base = um
  modified_base 18..19: mod_base = OTHER; note = S-phosphorothioate
  modified_base 19: mod_base = um
  modified_base 19..20: mod_base = OTHER; note = S-phosphorothioate
  modified_base 20: mod_base = gm
  modified_base 20..21: mod_base = OTHER; note = S-phosphorothioate
  modified_base 21: mod_base = um
  modified_base 21..22: mod_base = OTHER; note = S-phosphorothioate
  modified_base 22: mod_base = um
  modified_base 22..23: mod_base = OTHER; note = S-phosphorothioate
  modified_base 23: mod_base = cm
  modified_base 23..24: mod_base = OTHER; note = S-phosphorothioate
  modified_base 24: mod_base = OTHER; note = deoxyribose cytosine
  modified_base 24..25: mod_base = OTHER; note = S-phosphorothioate
  modified_base 25: mod_base = OTHER; note = deoxyribose uracil (position 3 connectivity)
  modified_base 25..26: mod_base = OTHER; note = S-phosphorothioate
  modified_base 26: mod_base = OTHER; note = deoxyribose inosine
  modified_base 26..27: mod_base = OTHER; note S-N-(1,3-dimethylimidazolidin-2-ylidene)phosphoramidate
  modified_base 27: mod_base = cm
  modified_base 27..28: mod_base = OTHER; note = S-phosphorothioate
  modified_base 28: mod_base = OTHER; note = 2-fluororibose cytosine
  modified_base 28..29: mod_base = OTHER; note = S-phosphorothioate
  modified_base 29: mod_base = gm
  modified_base 29..30: mod_base = OTHER; note R-N-(1,3-dimethylimidazolidin-2-ylidene)phosphoramidate
  modified_base 30: mod_base = cm
  source 1..30: mol_type = other RNA
tgttgccgtcgggcgagttgttcctgccgc

SEQ ID NO: 633 - RNA, 30 nt, synthetic construct
  misc_feature 1..30: note = Synthetic: WV-47559
  misc_feature 1..30: note = Synthetic: ADR-0102088
  modified_base 1: mod_base = OTHER; note = 2-fluororibose adenine
  modified_base 1..2: mod_base = OTHER; note R-N-(1,3-dimethylimidazolidin-2-ylidene)phosphoramidate
  modified_base 2: mod_base = OTHER; note = 2-fluororibose guanine
  modified_base 2..3: mod_base = OTHER; note = S-phosphorothioate
  modified_base 3: mod_base = OTHER; note = 2-fluororibose guanine
  modified_base 3..4: mod_base = OTHER; note = S-phosphorothioate
  modified_base 4: mod_base = OTHER; note = 2-fluororibose uracil
  modified_base 4..5: mod_base = OTHER; note = S-phosphorothioate
  modified_base 5: mod_base = OTHER; note = 2-fluororibose adenine
  modified_base 5..6: mod_base = OTHER; note = S-phosphorothioate
  modified_base 6: mod_base = OTHER; note = 2-fluororibose guanine
  modified_base 6..7: mod_base = OTHER; note = S-phosphorothioate
  modified_base 7: mod_base = OTHER; note = 2-fluororibose cytosine
  modified_base 7..8: mod_base = OTHER; note = S-phosphorothioate
  modified_base 8: mod_base = OTHER; note = 2-fluororibose uracil
  modified_base 8..9: mod_base = OTHER; note = S-phosphorothioate
  modified_base 9: mod_base = OTHER; note = 2-fluororibose guanine
  modified_base 9..10: mod_base = OTHER; note = S-phosphorothioate
  modified_base 10: mod_base = OTHER; note = 2-fluororibose adenine
  modified_base 10..11: mod_base = OTHER; note = S-phosphorothioate
  modified_base 11: mod_base = OTHER; note = 2-fluororibose guanine
  modified_base 11..12: mod_base = OTHER; note = S-phosphorothioate
  modified_base 12: mod_base = OTHER; note = 2-fluororibose cytosine
  modified_base 12..13: mod_base = OTHER; note = S-phosphorothioate
  modified_base 13: mod_base = OTHER; note = 2-fluororibose guanine
  modified_base 13..14: mod_base = OTHER; note = S-phosphorothioate
  modified_base 14: mod_base = OTHER; note = 2-fluororibose adenine
  modified_base 14..15: mod_base = OTHER; note = S-phosphorothioate
  modified_base 15: mod_base = OTHER; note = 2-fluororibose cytosine
  modified_base 15..16: mod_base = OTHER; note = S-phosphorothioate
  modified_base 16: mod_base = um
  modified_base 16..17: mod_base = OTHER; note = S-phosphorothioate
  modified_base 17: mod_base = gm
  modified_base 17..18: mod_base = OTHER; note = S-phosphorothioate
  modified_base 18: mod_base = um
  modified_base 18..19: mod_base = OTHER; note = S-phosphorothioate
  modified_base 19: mod_base = cm
  modified_base 19..20: mod_base = OTHER; note = S-phosphorothioate
  modified_base 20: mod_base = gm
  modified_base 20..21: mod_base = OTHER; note = S-phosphorothioate
  modified_base 21: mod_base = gm
  modified_base 21..22: mod_base = OTHER; note = S-phosphorothioate
  modified_base 22: mod_base = OTHER; note = 2-O-methylribose adenine
  modified_base 22..23: mod_base = OTHER; note = S-phosphorothioate
  modified_base 23: mod_base = OTHER; note = 2-O-methylribose adenine
  modified_base 23..24: mod_base = OTHER; note = S-phosphorothioate
  modified_base 24: mod_base = OTHER; note = deoxyribose guanine
  modified_base 24..25: mod_base = OTHER; note = S-phosphorothioate
  modified_base 25: mod_base = OTHER; note = deoxyribose uracil (position 3 connectivity)
  modified_base 25..26: mod_base = OTHER; note = S-phosphorothioate
  modified_base 26: mod_base = OTHER; note = deoxyribose adenine
  modified_base 26..27: mod_base = OTHER; note R-N-(1,3-dimethylimidazolidin-2-ylidene)phosphoramidate
  modified_base 27: mod_base = gm
  modified_base 27..28: mod_base = OTHER; note = S-phosphorothioate
  modified_base 28: mod_base = OTHER; note = 2-fluororibose cytosine
  modified_base 28..29: mod_base = OTHER; note = S-phosphorothioate
  modified_base 29: mod_base = cm
  modified_base 29..30: mod_base = OTHER; note R-N-(1,3-dimethylimidazolidin-2-ylidene)phosphoramidate
  modified_base 30: mod_base = gm
  source 1..30: mol_type = other RNA
aggtagctgagcgactgtcggaagtagccg

SEQ ID NO: 634 - RNA, 30 nt, synthetic construct
  misc_feature 1..30: note = Synthetic: WV-47558
  misc_feature 1..30: note = Synthetic: ADR-0104851
  modified_base 1: mod_base = OTHER; note = 2-fluororibose guanine
  modified_base 1..2: mod_base = OTHER; note R-N-(1,3-dimethylimidazolidin-2-ylidene)phosphoramidate
  modified_base 2: mod_base = OTHER; note = 2-fluororibose guanine
  modified_base 2..3: mod_base = OTHER; note = S-phosphorothioate
  modified_base 3: mod_base = OTHER; note = 2-fluororibose guanine
  modified_base 3..4: mod_base = OTHER; note = S-phosphorothioate
  modified_base 4: mod_base = OTHER; note = 2-fluororibose cytosine
  modified_base 4..5: mod_base = OTHER; note = S-phosphorothioate
  modified_base 5: mod_base = OTHER; note = 2-fluororibose uracil
  modified_base 5..6: mod_base = OTHER; note = S-phosphorothioate
  modified_base 6: mod_base = OTHER; note = 2-fluororibose guanine
  modified_base 6..7: mod_base = OTHER; note = S-phosphorothioate
  modified_base 7: mod_base = OTHER; note = 2-fluororibose guanine
  modified_base 7..8: mod_base = OTHER; note = S-phosphorothioate
  modified_base 8: mod_base = OTHER; note = 2-fluororibose cytosine
  modified_base 8..9: mod_base = OTHER; note = S-phosphorothioate
  modified_base 9: mod_base = OTHER; note = 2-fluororibose uracil
  modified_base 9..10: mod_base = OTHER; note = S-phosphorothioate
  modified_base 10: mod_base = OTHER; note = 2-fluororibose guanine
  modified_base 10..11: mod_base = OTHER; note = S-phosphorothioate
  modified_base 11: mod_base = OTHER; note = 2-fluororibose adenine
  modified_base 11..12: mod_base = OTHER; note = S-phosphorothioate
  modified_base 12: mod_base = OTHER; note = 2-fluororibose adenine
  modified_base 12..13: mod_base = OTHER; note = S-phosphorothioate
  modified_base 13: mod_base = OTHER; note = 2-fluororibose uracil
  modified_base 13..14: mod_base = OTHER; note = S-phosphorothioate
  modified_base 14: mod_base = OTHER; note = 2-fluororibose uracil
  modified_base 14..15: mod_base = OTHER; note = S-phosphorothioate
  modified_base 15: mod_base = OTHER; note = 2-fluororibose guanine
  modified_base 15..16: mod_base = OTHER; note = S-phosphorothioate
  modified_base 16: mod_base = gm
  modified_base 16..17: mod_base = OTHER; note = S-phosphorothioate
  modified_base 17: mod_base = gm
  modified_base 17..18: mod_base = OTHER; note = S-phosphorothioate
  modified_base 18: mod_base = OTHER; note = 2-O-methylribose adenine
  modified_base 18..19: mod_base = OTHER; note = S-phosphorothioate
  modified_base 19: mod_base = gm
  modified_base 19..20: mod_base = OTHER; note = S-phosphorothioate
  modified_base 20: mod_base = OTHER; note = 2-O-methylribose adenine
  modified_base 20..21: mod_base = OTHER; note = S-phosphorothioate
  modified_base 21: mod_base = OTHER; note = 2-O-methylribose adenine
  modified_base 21..22: mod_base = OTHER; note = S-phosphorothioate
  modified_base 22: mod_base = OTHER; note = 2-O-methylribose adenine
  modified_base 22..23: mod_base = OTHER; note = S-phosphorothioate
  modified_base 23: mod_base = OTHER; note = deoxyribose thymine
  modified_base 23..24: mod_base = OTHER; note = S-phosphorothioate
  modified_base 24: mod_base = OTHER; note = deoxyribose uracil (position 3 connectivity)
  modified_base 24..25: mod_base = OTHER; note = S-phosphorothioate
  modified_base 25: mod_base = OTHER; note = deoxyribose cytosine
  modified_base 25..26: mod_base = OTHER; note R-N-(1,3-dimethylimidazolidin-2-ylidene)phosphoramidate
  modified_base 26: mod_base = OTHER; note = 2-O-methylribose adenine
  modified_base 26..27: mod_base = OTHER; note = S-phosphorothioate
  modified_base 27: mod_base = OTHER; note = 2-fluororibose cytosine
  modified_base 27..28: mod_base = OTHER; note = S-phosphorothioate
  modified_base 28: mod_base = cm
  modified_base 28..29: mod_base = OTHER; note = S-phosphorothioate
  modified_base 29: mod_base = um
  modified_base 29..30: mod_base = OTHER; note R-N-(1,3-dimethylimidazolidin-2-ylidene)phosphoramidate
  modified_base 30: mod_base = gm
  source 1..30: mol_type = other RNA
gggctggctgaattgggagaaattcacctg

SEQ ID NO: 635 - RNA, 30 nt, synthetic construct
  misc_feature 1..30: note = Synthetic: WV-47548
  misc_feature 1..30: note = Synthetic: ADR-0104848
  modified_base 1: mod_base = OTHER; note = 2-fluororibose guanine
  modified_base 1..2: mod_base = OTHER; note R-N-(1,3-dimethylimidazolidin-2-ylidene)phosphoramidate
  modified_base 2: mod_base = OTHER; note = 2-fluororibose cytosine
  modified_base 2..3: mod_base = OTHER; note = S-phosphorothioate
  modified_base 3: mod_base = OTHER; note = 2-fluororibose uracil
  modified_base 3..4: mod_base = OTHER; note = S-phosphorothioate
  modified_base 4: mod_base = OTHER; note = 2-fluororibose guanine
  modified_base 4..5: mod_base = OTHER; note = S-phosphorothioate
  modified_base 5: mod_base = OTHER; note = 2-fluororibose adenine
  modified_base 5..6: mod_base = OTHER; note = S-phosphorothioate
  modified_base 6: mod_base = OTHER; note = 2-fluororibose adenine
  modified_base 6..7: mod_base = OTHER; note = S-phosphorothioate
  modified_base 7: mod_base = OTHER; note = 2-fluororibose uracil
  modified_base 7..8: mod_base = OTHER; note = S-phosphorothioate
  modified_base 8: mod_base = OTHER; note = 2-fluororibose uracil
  modified_base 8..9: mod_base = OTHER; note = S-phosphorothioate
  modified_base 9: mod_base = OTHER; note = 2-fluororibose guanine
  modified_base 9..10: mod_base = OTHER; note = S-phosphorothioate
  modified_base 10: mod_base = OTHER; note = 2-fluororibose guanine
  modified_base 10..11: mod_base = OTHER; note = S-phosphorothioate
  modified_base 11: mod_base = OTHER; note = 2-fluororibose guanine
  modified_base 11..12: mod_base = OTHER; note = S-phosphorothioate
  modified_base 12: mod_base = OTHER; note = 2-fluororibose adenine
  modified_base 12..13: mod_base = OTHER; note = S-phosphorothioate
  modified_base 13: mod_base = OTHER; note = 2-fluororibose guanine
  modified_base 13..14: mod_base = OTHER; note = S-phosphorothioate
  modified_base 14: mod_base = OTHER; note = 2-fluororibose adenine
  modified_base 14..15: mod_base = OTHER; note = S-phosphorothioate
  modified_base 15: mod_base = OTHER; note = 2-fluororibose adenine
  modified_base 15..16: mod_base = OTHER; note = S-phosphorothioate
  modified_base 16: mod_base = OTHER; note = 2-O-methylribose adenine
  modified_base 16..17: mod_base = OTHER; note = S-phosphorothioate
  modified_base 17: mod_base = um
  modified_base 17..18: mod_base = OTHER; note = S-phosphorothioate
  modified_base 18: mod_base = um
  modified_base 18..19: mod_base = OTHER; note = S-phosphorothioate
  modified_base 19: mod_base = cm
  modified_base 19..20: mod_base = OTHER; note = S-phosphorothioate
  modified_base 20: mod_base = OTHER; note = 2-O-methylribose adenine
  modified_base 20..21: mod_base = OTHER; note = S-phosphorothioate
  modified_base 21: mod_base = cm
  modified_base 21..22: mod_base = OTHER; note = S-phosphorothioate
  modified_base 22: mod_base = cm
  modified_base 22..23: mod_base = OTHER; note = S-phosphorothioate
  modified_base 23: mod_base = um
  modified_base 23..24: mod_base = OTHER; note = S-phosphorothioate
  modified_base 24: mod_base = OTHER; note = deoxyribose guanine
  modified_base 24..25: mod_base = OTHER; note = S-phosphorothioate
  modified_base 25: mod_base = OTHER; note = deoxyribose uracil (position 3 connectivity)
  modified_base 25..26: mod_base = OTHER; note = S-phosphorothioate
  modified_base 26: mod_base = OTHER; note = deoxyribose cytosine
  modified_base 26..27: mod_base = OTHER; note R-N-(1,3-dimethylimidazolidin-2-ylidene)phosphoramidate
  modified_base 27: mod_base = um
  modified_base 27..28: mod_base = OTHER; note = S-phosphorothioate
  modified_base 28: mod_base = OTHER; note = 2-fluororibose cytosine
  modified_base 28..29: mod_base = OTHER; note = S-phosphorothioate
  modified_base 29: mod_base = um
  modified_base 29..30: mod_base = OTHER; note R-N-(1,3-dimethylimidazolidin-2-ylidene)phosphoramidate
  modified_base 30: mod_base = um
  source 1..30: mol_type = other RNA
gctgaattgggagaaattcacctgtctctt

SEQ ID NO: 636 - RNA, 30 nt, synthetic construct
  misc_feature 1..30: note = Synthetic: WV-47547
  misc_feature 1..30: note = Synthetic: ADR-0104853
  modified_base 1: mod_base = OTHER; note = 2-fluororibose uracil
  modified_base 1..2: mod_base = OTHER; note R-N-(1,3-dimethylimidazolidin-2-ylidene)phosphoramidate
  modified_base 2: mod_base = OTHER; note = 2-fluororibose guanine
  modified_base 2..3: mod_base = OTHER; note = S-phosphorothioate
  modified_base 3: mod_base = OTHER; note = 2-fluororibose adenine
  modified_base 3..4: mod_base = OTHER; note = S-phosphorothioate
  modified_base 4: mod_base = OTHER; note = 2-fluororibose adenine
  modified_base 4..5: mod_base = OTHER; note = S-phosphorothioate
  modified_base 5: mod_base = OTHER; note = 2-fluororibose uracil
  modified_base 5..6: mod_base = OTHER; note = S-phosphorothioate
  modified_base 6: mod_base = OTHER; note = 2-fluororibose uracil
  modified_base 6..7: mod_base = OTHER; note = S-phosphorothioate
  modified_base 7: mod_base = OTHER; note = 2-fluororibose guanine
  modified_base 7..8: mod_base = OTHER; note = S-phosphorothioate
  modified_base 8: mod_base = OTHER; note = 2-fluororibose guanine
  modified_base 8..9: mod_base = OTHER; note = S-phosphorothioate
  modified_base 9: mod_base = OTHER; note = 2-fluororibose guanine
  modified_base 9..10: mod_base = OTHER; note = S-phosphorothioate
  modified_base 10: mod_base = OTHER; note = 2-fluororibose adenine
  modified_base 10..11: mod_base = OTHER; note = S-phosphorothioate
  modified_base 11: mod_base = OTHER; note = 2-fluororibose guanine
  modified_base 11..12: mod_base = OTHER; note = S-phosphorothioate
  modified_base 12: mod_base = OTHER; note = 2-fluororibose adenine
  modified_base 12..13: mod_base = OTHER; note = S-phosphorothioate
  modified_base 13: mod_base = OTHER; note = 2-fluororibose adenine
  modified_base 13..14: mod_base = OTHER; note = S-phosphorothioate
  modified_base 14: mod_base = OTHER; note = 2-fluororibose adenine
  modified_base 14..15: mod_base = OTHER; note = S-phosphorothioate
  modified_base 15: mod_base = OTHER; note = 2-fluororibose uracil
  modified_base 15..16: mod_base = OTHER; note = S-phosphorothioate
  modified_base 16: mod_base = um
  modified_base 16..17: mod_base = OTHER; note = S-phosphorothioate
  modified_base 17: mod_base = cm
  modified_base 17..18: mod_base = OTHER; note = S-phosphorothioate
  modified_base 18: mod_base = OTHER; note = 2-O-methylribose adenine
  modified_base 18..19: mod_base = OTHER; note = S-phosphorothioate
  modified_base 19: mod_base = cm
  modified_base 19..20: mod_base = OTHER; note = S-phosphorothioate
  modified_base 20: mod_base = cm
  modified_base 20..21: mod_base = OTHER; note = S-phosphorothioate
  modified_base 21: mod_base = um
  modified_base 21..22: mod_base = OTHER; note = S-phosphorothioate
  modified_base 22: mod_base = gm
  modified_base 22..23: mod_base = OTHER; note = S-phosphorothioate
  modified_base 23: mod_base = um
  modified_base 23..24: mod_base = OTHER; note = S-phosphorothioate
  modified_base 24: mod_base = OTHER; note = deoxyribose cytosine
  modified_base 24..25: mod_base = OTHER; note = S-phosphorothioate
  modified_base 25: mod_base = OTHER; note = deoxyribose uracil (position 3 connectivity)
  modified_base 25..26: mod_base = OTHER; note = S-phosphorothioate
  modified_base 26: mod_base = OTHER; note = deoxyribose cytosine
  modified_base 26..27: mod_base = OTHER; note R-N-(1,3-dimethylimidazolidin-2-ylidene)phosphoramidate
  modified_base 27: mod_base = um
  modified_base 27..28: mod_base = OTHER; note = S-phosphorothioate
  modified_base 28: mod_base = OTHER; note = 2-fluororibose uracil
  modified_base 28..29: mod_base = OTHER; note = S-phosphorothioate
  modified_base 29: mod_base = cm
  modified_base 29..30: mod_base = OTHER; note R-N-(1,3-dimethylimidazolidin-2-ylidene)phosphoramidate
  modified_base 30: mod_base = OTHER; note = 2-O-methylribose adenine
  source 1..30: mol_type = other RNA
tgaattgggagaaattcacctgtctcttca

SEQ ID NO: 637 - RNA, 30 nt, synthetic construct
  misc_feature 1..30: note = Synthetic: WV-47556
  misc_feature 1..30: note = Synthetic: ADR-0104846
  modified_base 1: mod_base = OTHER; note = 2-fluororibose guanine
  modified_base 1..2: mod_base = OTHER; note R-N-(1,3-dimethylimidazolidin-2-ylidene)phosphoramidate
  modified_base 2: mod_base = OTHER; note = 2-fluororibose adenine
  modified_base 2..3: mod_base = OTHER; note = S-phosphorothioate
  modified_base 3: mod_base = OTHER; note = 2-fluororibose adenine
  modified_base 3..4: mod_base = OTHER; note = S-phosphorothioate
  modified_base 4: mod_base = OTHER; note = 2-fluororibose uracil
  modified_base 4..5: mod_base = OTHER; note = S-phosphorothioate
  modified_base 5: mod_base = OTHER; note = 2-fluororibose uracil
  modified_base 5..6: mod_base = OTHER; note = S-phosphorothioate
  modified_base 6: mod_base = OTHER; note = 2-fluororibose guanine
  modified_base 6..7: mod_base = OTHER; note = S-phosphorothioate
  modified_base 7: mod_base = OTHER; note = 2-fluororibose guanine
  modified_base 7..8: mod_base = OTHER; note = S-phosphorothioate
  modified_base 8: mod_base = OTHER; note = 2-fluororibose guanine
  modified_base 8..9: mod_base = OTHER; note = S-phosphorothioate
  modified_base 9: mod_base = OTHER; note = 2-fluororibose adenine
  modified_base 9..10: mod_base = OTHER; note = S-phosphorothioate
  modified_base 10: mod_base = OTHER; note = 2-fluororibose guanine
  modified_base 10..11: mod_base = OTHER; note = S-phosphorothioate
  modified_base 11: mod_base = OTHER; note = 2-fluororibose adenine
  modified_base 11..12: mod_base = OTHER; note = S-phosphorothioate
  modified_base 12: mod_base = OTHER; note = 2-fluororibose adenine
  modified_base 12..13: mod_base = OTHER; note = S-phosphorothioate
  modified_base 13: mod_base = OTHER; note = 2-fluororibose adenine
  modified_base 13..14: mod_base = OTHER; note = S-phosphorothioate
  modified_base 14: mod_base = OTHER; note = 2-fluororibose uracil
  modified_base 14..15: mod_base = OTHER; note = S-phosphorothioate
  modified_base 15: mod_base = OTHER; note = 2-fluororibose uracil
  modified_base 15..16: mod_base = OTHER; note = S-phosphorothioate
  modified_base 16: mod_base = cm
  modified_base 16..17: mod_base = OTHER; note = S-phosphorothioate
  modified_base 17: mod_base = OTHER; note = 2-O-methylribose adenine
  modified_base 17..18: mod_base = OTHER; note = S-phosphorothioate
  modified_base 18: mod_base = cm
  modified_base 18..19: mod_base = OTHER; note = S-phosphorothioate
  modified_base 19: mod_base = cm
  modified_base 19..20: mod_base = OTHER; note = S-phosphorothioate
  modified_base 20: mod_base = um
  modified_base 20..21: mod_base = OTHER; note = S-phosphorothioate
  modified_base 21: mod_base = gm
  modified_base 21..22: mod_base = OTHER; note = S-phosphorothioate
  modified_base 22: mod_base = um
  modified_base 22..23: mod_base = OTHER; note = S-phosphorothioate
  modified_base 23: mod_base = OTHER; note = deoxyribose cytosine
  modified_base 23..24: mod_base = OTHER; note = S-phosphorothioate
  modified_base 24: mod_base = OTHER; note = deoxyribose uracil (position 3 connectivity)
  modified_base 24..25: mod_base = OTHER; note = S-phosphorothioate
  modified_base 25: mod_base = OTHER; note = deoxyribose cytosine
  modified_base 25..26: mod_base = OTHER; note R-N-(1,3-dimethylimidazolidin-2-ylidene)phosphoramidate
  modified_base 26: mod_base = um
  modified_base 26..27: mod_base = OTHER; note = S-phosphorothioate
  modified_base 27: mod_base = OTHER; note = 2-fluororibose uracil
  modified_base 27..28: mod_base = OTHER; note = S-phosphorothioate
  modified_base 28: mod_base = cm
  modified_base 28..29: mod_base = OTHER; note = S-phosphorothioate
  modified_base 29: mod_base = OTHER; note = 2-O-methylribose adenine
  modified_base 29..30: mod_base = OTHER; note R-N-(1,3-dimethylimidazolidin-2-ylidene)phosphoramidate
  modified_base 30: mod_base = um
  source 1..30: mol_type = other RNA
gaattgggagaaattcacctgtctcttcat

SEQ ID NO: 638 - RNA, 30 nt, synthetic construct
  misc_feature 1..30: note = Synthetic: WV-47546
  misc_feature 1..30: note = Synthetic: ADR-0104841
  modified_base 1: mod_base = OTHER; note = 2-fluororibose adenine
  modified_base 1..2: mod_base = OTHER; note R-N-(1,3-dimethylimidazolidin-2-ylidene)phosphoramidate
  modified_base 2: mod_base = OTHER; note = 2-fluororibose uracil
  modified_base 2..3: mod_base = OTHER; note = S-phosphorothioate
  modified_base 3: mod_base = OTHER; note = 2-fluororibose uracil
  modified_base 3..4: mod_base = OTHER; note = S-phosphorothioate
  modified_base 4: mod_base = OTHER; note = 2-fluororibose guanine
  modified_base 4..5: mod_base = OTHER; note = S-phosphorothioate
  modified_base 5: mod_base = OTHER; note = 2-fluororibose guanine
  modified_base 5..6: mod_base = OTHER; note = S-phosphorothioate
  modified_base 6: mod_base = OTHER; note = 2-fluororibose guanine
  modified_base 6..7: mod_base = OTHER; note = S-phosphorothioate
  modified_base 7: mod_base = OTHER; note = 2-fluororibose adenine
  modified_base 7..8: mod_base = OTHER; note = S-phosphorothioate
  modified_base 8: mod_base = OTHER; note = 2-fluororibose guanine
  modified_base 8..9: mod_base = OTHER; note = S-phosphorothioate
  modified_base 9: mod_base = OTHER; note = 2-fluororibose adenine
  modified_base 9..10: mod_base = OTHER; note = S-phosphorothioate
  modified_base 10: mod_base = OTHER; note = 2-fluororibose adenine
  modified_base 10..11: mod_base = OTHER; note = S-phosphorothioate
  modified_base 11: mod_base = OTHER; note = 2-fluororibose adenine
  modified_base 11..12: mod_base = OTHER; note = S-phosphorothioate
  modified_base 12: mod_base = OTHER; note = 2-fluororibose uracil
  modified_base 12..13: mod_base = OTHER; note = S-phosphorothioate
  modified_base 13: mod_base = OTHER; note = 2-fluororibose uracil
  modified_base 13..14: mod_base = OTHER; note = S-phosphorothioate
  modified_base 14: mod_base = OTHER; note = 2-fluororibose cytosine
  modified_base 14..15: mod_base = OTHER; note = S-phosphorothioate
  modified_base 15: mod_base = OTHER; note = 2-fluororibose adenine
  modified_base 15..16: mod_base = OTHER; note = S-phosphorothioate
  modified_base 16: mod_base = cm
  modified_base 16..17: mod_base = OTHER; note = S-phosphorothioate
  modified_base 17: mod_base = cm
  modified_base 17..18: mod_base = OTHER; note = S-phosphorothioate
  modified_base 18: mod_base = um
  modified_base 18..19: mod_base = OTHER; note = S-phosphorothioate
  modified_base 19: mod_base = gm
  modified_base 19..20: mod_base = OTHER; note = S-phosphorothioate
  modified_base 20: mod_base = um
  modified_base 20..21: mod_base = OTHER; note = S-phosphorothioate
  modified_base 21: mod_base = cm
  modified_base 21..22: mod_base = OTHER; note = S-phosphorothioate
  modified_base 22: mod_base = um
  modified_base 22..23: mod_base = OTHER; note = S-phosphorothioate
  modified_base 23: mod_base = cm
  modified_base 23..24: mod_base = OTHER; note = S-phosphorothioate
  modified_base 24: mod_base = OTHER; note = deoxyribose thymine
  modified_base 24..25: mod_base = OTHER; note = S-phosphorothioate
  modified_base 25: mod_base = OTHER; note = deoxyribose uracil (position 3 connectivity)
  modified_base 25..26: mod_base = OTHER; note = S-phosphorothioate
  modified_base 26: mod_base = OTHER; note = deoxyribose cytosine
  modified_base 26..27: mod_base = OTHER; note R-N-(1,3-dimethylimidazolidin-2-ylidene)phosphoramidate
  modified_base 27: mod_base = OTHER; note = 2-O-methylribose adenine
  modified_base 27..28: mod_base = OTHER; note = S-phosphorothioate
  modified_base 28: mod_base = OTHER; note = 2-fluororibose uracil
  modified_base 28..29: mod_base = OTHER; note = S-phosphorothioate
  modified_base 29: mod_base = cm
  modified_base 29..30: mod_base = OTHER; note R-N-(1,3-dimethylimidazolidin-2-ylidene)phosphoramidate
  modified_base 30: mod_base = um
  source 1..30: mol_type = other RNA
attgggagaaattcacctgtctcttcatct

SEQ ID NO: 639 - RNA, 30 nt, synthetic construct
  misc_feature 1..30: note = Synthetic: WV-47554
  misc_feature 1..30: note = Synthetic: ADR-0104849
  modified_base 1: mod_base = OTHER; note = 2-fluororibose guanine
  modified_base 1..2: mod_base = OTHER; note R-N-(1,3-dimethylimidazolidin-2-ylidene)phosphoramidate
  modified_base 2: mod_base = OTHER; note = 2-fluororibose guanine
  modified_base 2..3: mod_base = OTHER; note = S-phosphorothioate
  modified_base 3: mod_base = OTHER; note = 2-fluororibose adenine
  modified_base 3..4: mod_base = OTHER; note = S-phosphorothioate
  modified_base 4: mod_base = OTHER; note = 2-fluororibose guanine
  modified_base 4..5: mod_base = OTHER; note = S-phosphorothioate
  modified_base 5: mod_base = OTHER; note = 2-fluororibose adenine
  modified_base 5..6: mod_base = OTHER; note = S-phosphorothioate
  modified_base 6: mod_base = OTHER; note = 2-fluororibose adenine
  modified_base 6..7: mod_base = OTHER; note = S-phosphorothioate
  modified_base 7: mod_base = OTHER; note = 2-fluororibose adenine
  modified_base 7..8: mod_base = OTHER; note = S-phosphorothioate
  modified_base 8: mod_base = OTHER; note = 2-fluororibose uracil
  modified_base 8..9: mod_base = OTHER; note = S-phosphorothioate
  modified_base 9: mod_base = OTHER; note = 2-fluororibose uracil
  modified_base 9..10: mod_base = OTHER; note = S-phosphorothioate
  modified_base 10: mod_base = OTHER; note = 2-fluororibose cytosine
  modified_base 10..11: mod_base = OTHER; note = S-phosphorothioate
  modified_base 11: mod_base = OTHER; note = 2-fluororibose adenine
  modified_base 11..12: mod_base = OTHER; note = S-phosphorothioate
  modified_base 12: mod_base = OTHER; note = 2-fluororibose cytosine
  modified_base 12..13: mod_base = OTHER; note = S-phosphorothioate
  modified_base 13: mod_base = OTHER; note = 2-fluororibose cytosine
  modified_base 13..14: mod_base = OTHER; note = S-phosphorothioate
  modified_base 14: mod_base = OTHER; note = 2-fluororibose uracil
  modified_base 14..15: mod_base = OTHER; note = S-phosphorothioate
  modified_base 15: mod_base = OTHER; note = 2-fluororibose guanine
  modified_base 15..16: mod_base = OTHER; note = S-phosphorothioate
  modified_base 16: mod_base = um
  modified_base 16..17: mod_base = OTHER; note = S-phosphorothioate
  modified_base 17: mod_base = cm
  modified_base 17..18: mod_base = OTHER; note = S-phosphorothioate
  modified_base 18: mod_base = um
  modified_base 18..19: mod_base = OTHER; note = S-phosphorothioate
  modified_base 19: mod_base = cm
  modified_base 19..20: mod_base = OTHER; note = S-phosphorothioate
  modified_base 20: mod_base = um
  modified_base 20..21: mod_base = OTHER; note = S-phosphorothioate
  modified_base 21: mod_base = um
  modified_base 21..22: mod_base = OTHER; note = S-phosphorothioate
  modified_base 22: mod_base = cm
  modified_base 22..23: mod_base = OTHER; note = S-phosphorothioate
  modified_base 23: mod_base = OTHER; note = deoxyribose adenine
  modified_base 23..24: mod_base = OTHER; note = S-phosphorothioate
  modified_base 24: mod_base = OTHER; note = deoxyribose uracil (position 3 connectivity)
  modified_base 24..25: mod_base = OTHER; note = S-phosphorothioate
  modified_base 25: mod_base = OTHER; note = deoxyribose cytosine
  modified_base 25..26: mod_base = OTHER; note R-N-(1,3-dimethylimidazolidin-2-ylidene)phosphoramidate
  modified_base 26: mod_base = um
  modified_base 26..27: mod_base = OTHER; note = S-phosphorothioate
  modified_base 27: mod_base = OTHER; note = 2-fluororibose adenine
  modified_base 27..28: mod_base = OTHER; note = S-phosphorothioate
  modified_base 28: mod_base = gm
  modified_base 28..29: mod_base = OTHER; note = S-phosphorothioate
  modified_base 29: mod_base = um
  modified_base 29..30: mod_base = OTHER; note R-N-(1,3-dimethylimidazolidin-2-ylidene)phosphoramidate
  modified_base 30: mod_base = um
  source 1..30: mol_type = other RNA
ggagaaattcacctgtctcttcatctagtt

SEQ ID NO: 640 - RNA, 30 nt, synthetic construct
  misc_feature 1..30: note = Synthetic: WV-47545
  misc_feature 1..30: note = Synthetic: ADR-0104850
  modified_base 1: mod_base = OTHER; note = 2-fluororibose guanine
  modified_base 1..2: mod_base = OTHER; note R-N-(1,3-dimethylimidazolidin-2-ylidene)phosphoramidate
  modified_base 2: mod_base = OTHER; note = 2-fluororibose guanine
  modified_base 2..3: mod_base = OTHER; note = S-phosphorothioate
  modified_base 3: mod_base = OTHER; note = 2-fluororibose guanine
  modified_base 3..4: mod_base = OTHER; note = S-phosphorothioate
  modified_base 4: mod_base = OTHER; note = 2-fluororibose adenine
  modified_base 4..5: mod_base = OTHER; note = S-phosphorothioate
  modified_base 5: mod_base = OTHER; note = 2-fluororibose guanine
  modified_base 5..6: mod_base = OTHER; note = S-phosphorothioate
  modified_base 6: mod_base = OTHER; note = 2-fluororibose adenine
  modified_base 6..7: mod_base = OTHER; note = S-phosphorothioate
  modified_base 7: mod_base = OTHER; note = 2-fluororibose adenine
  modified_base 7..8: mod_base = OTHER; note = S-phosphorothioate
  modified_base 8: mod_base = OTHER; note = 2-fluororibose adenine
  modified_base 8..9: mod_base = OTHER; note = S-phosphorothioate
  modified_base 9: mod_base = OTHER; note = 2-fluororibose uracil
  modified_base 9..10: mod_base = OTHER; note = S-phosphorothioate
  modified_base 10: mod_base = OTHER; note = 2-fluororibose uracil
  modified_base 10..11: mod_base = OTHER; note = S-phosphorothioate
  modified_base 11: mod_base = OTHER; note = 2-fluororibose cytosine
  modified_base 11..12: mod_base = OTHER; note = S-phosphorothioate
  modified_base 12: mod_base = OTHER; note = 2-fluororibose adenine
  modified_base 12..13: mod_base = OTHER; note = S-phosphorothioate
  modified_base 13: mod_base = OTHER; note = 2-fluororibose cytosine
  modified_base 13..14: mod_base = OTHER; note = S-phosphorothioate
  modified_base 14: mod_base = OTHER; note = 2-fluororibose cytosine
  modified_base 14..15: mod_base = OTHER; note = S-phosphorothioate
  modified_base 15: mod_base = OTHER; note = 2-fluororibose uracil
  modified_base 15..16: mod_base = OTHER; note = S-phosphorothioate
  modified_base 16: mod_base = gm
  modified_base 16..17: mod_base = OTHER; note = S-phosphorothioate
  modified_base 17: mod_base = um
  modified_base 17..18: mod_base = OTHER; note = S-phosphorothioate
  modified_base 18: mod_base = cm
  modified_base 18..19: mod_base = OTHER; note = S-phosphorothioate
  modified_base 19: mod_base = um
  modified_base 19..20: mod_base = OTHER; note = S-phosphorothioate
  modified_base 20: mod_base = cm
  modified_base 20..21: mod_base = OTHER; note = S-phosphorothioate
  modified_base 21: mod_base = um
  modified_base 21..22: mod_base = OTHER; note = S-phosphorothioate
  modified_base 22: mod_base = um
  modified_base 22..23: mod_base = OTHER; note = S-phosphorothioate
  modified_base 23: mod_base = cm
  modified_base 23..24: mod_base = OTHER; note = S-phosphorothioate
  modified_base 24: mod_base = OTHER; note = deoxyribose adenine
  modified_base 24..25: mod_base = OTHER; note = S-phosphorothioate
  modified_base 25: mod_base = OTHER; note = deoxyribose uracil (position 3 connectivity)
  modified_base 25..26: mod_base = OTHER; note = S-phosphorothioate
  modified_base 26: mod_base = OTHER; note = deoxyribose cytosine
  modified_base 26..27: mod_base = OTHER; note R-N-(1,3-dimethylimidazolidin-2-ylidene)phosphoramidate
  modified_base 27: mod_base = um
  modified_base 27..28: mod_base = OTHER; note = S-phosphorothioate
  modified_base 28: mod_base = OTHER; note = 2-fluororibose adenine
  modified_base 28..29: mod_base = OTHER; note = S-phosphorothioate
  modified_base 29: mod_base = gm
  modified_base 29..30: mod_base = OTHER; note R-N-(1,3-dimethylimidazolidin-2-ylidene)phosphoramidate
  modified_base 30: mod_base = um
  source 1..30: mol_type = other RNA
gggagaaattcacctgtctcttcatctagt

SEQ ID NO: 641 - RNA, 30 nt, synthetic construct
  misc_feature 1..30: note = Synthetic: WV-47553
  misc_feature 1..30: note = Synthetic: ADR-0104840
  modified_base 1: mod_base = OTHER; note = 2-fluororibose adenine
  modified_base 1..2: mod_base = OTHER; note R-N-(1,3-dimethylimidazolidin-2-ylidene)phosphoramidate
  modified_base 2: mod_base = OTHER; note = 2-fluororibose uracil
  modified_base 2..3: mod_base = OTHER; note = S-phosphorothioate
  modified_base 3: mod_base = OTHER; note = 2-fluororibose adenine
  modified_base 3..4: mod_base = OTHER; note = S-phosphorothioate
  modified_base 4: mod_base = OTHER; note = 2-fluororibose cytosine
  modified_base 4..5: mod_base = OTHER; note = S-phosphorothioate
  modified_base 5: mod_base = OTHER; note = 2-fluororibose uracil
  modified_base 5..6: mod_base = OTHER; note = S-phosphorothioate
  modified_base 6: mod_base = OTHER; note = 2-fluororibose uracil
  modified_base 6..7: mod_base = OTHER; note = S-phosphorothioate
  modified_base 7: mod_base = OTHER; note = 2-fluororibose cytosine
  modified_base 7..8: mod_base = OTHER; note = S-phosphorothioate
  modified_base 8: mod_base = OTHER; note = 2-fluororibose uracil
  modified_base 8..9: mod_base = OTHER; note = S-phosphorothioate
  modified_base 9: mod_base = OTHER; note = 2-fluororibose cytosine
  modified_base 9..10: mod_base = OTHER; note = S-phosphorothioate
  modified_base 10: mod_base = OTHER; note = 2-fluororibose guanine
  modified_base 10..11: mod_base = OTHER; note = S-phosphorothioate
  modified_base 11: mod_base = OTHER; note = 2-fluororibose adenine
  modified_base 11..12: mod_base = OTHER; note = S-phosphorothioate
  modified_base 12: mod_base = OTHER; note = 2-fluororibose cytosine
  modified_base 12..13: mod_base = OTHER; note = S-phosphorothioate
  modified_base 13: mod_base = OTHER; note = 2-fluororibose uracil
  modified_base 13..14: mod_base = OTHER; note = S-phosphorothioate
  modified_base 14: mod_base = OTHER; note = 2-fluororibose uracil
  modified_base 14..15: mod_base = OTHER; note = S-phosphorothioate
  modified_base 15: mod_base = OTHER; note = 2-fluororibose adenine
  modified_base 15..16: mod_base = OTHER; note = S-phosphorothioate
  modified_base 16: mod_base = cm
  modified_base 16..17: mod_base = OTHER; note = S-phosphorothioate
  modified_base 17: mod_base = um
  modified_base 17..18: mod_base = OTHER; note = S-phosphorothioate
  modified_base 18: mod_base = cm
  modified_base 18..19: mod_base = OTHER; note = S-phosphorothioate
  modified_base 19: mod_base = cm
  modified_base 19..20: mod_base = OTHER; note = S-phosphorothioate
  modified_base 20: mod_base = OTHER; note = 2-O-methylribose adenine
  modified_base 20..21: mod_base = OTHER; note = S-phosphorothioate
  modified_base 21: mod_base = OTHER; note = 2-O-methylribose adenine
  modified_base 21..22: mod_base = OTHER; note = S-phosphorothioate
  modified_base 22: mod_base = gm
  modified_base 22..23: mod_base = OTHER; note = S-phosphorothioate
  modified_base 23: mod_base = OTHER; note = deoxyribose adenine
  modified_base 23..24: mod_base = OTHER; note = S-phosphorothioate
  modified_base 24: mod_base = OTHER; note = deoxyribose uracil (position 3 connectivity)
  modified_base 24..25: mod_base = OTHER; note = S-phosphorothioate
  modified_base 25: mod_base = OTHER; note = deoxyribose cytosine
  modified_base 25..26: mod_base = OTHER; note R-N-(1,3-dimethylimidazolidin-2-ylidene)phosphoramidate
  modified_base 26: mod_base = um
  modified_base 26..27: mod_base = OTHER; note = S-phosphorothioate
  modified_base 27: mod_base = OTHER; note = 2-fluororibose adenine
  modified_base 27..28: mod_base = OTHER; note = S-phosphorothioate
  modified_base 28: mod_base = um
  modified_base 28..29: mod_base = OTHER; note = S-phosphorothioate
  modified_base 29: mod_base = OTHER; note = 2-O-methylribose adenine
  modified_base 29..30: mod_base = OTHER; note R-N-(1,3-dimethylimidazolidin-2-ylidene)phosphoramidate
  modified_base 30: mod_base = um
  source 1..30: mol_type = other RNA
atacttctcgacttactccaagatctatat

SEQ ID NO: 642 - RNA, 30 nt, synthetic construct
  misc_feature 1..30: note = Synthetic: WV-47543
  misc_feature 1..30: note = Synthetic: ADR-0104845
  modified_base 1: mod_base = OTHER; note = 2-fluororibose cytosine
  modified_base 1..2: mod_base = OTHER; note R-N-(1,3-dimethylimidazolidin-2-ylidene)phosphoramidate
  modified_base 2: mod_base = OTHER; note = 2-fluororibose uracil
  modified_base 2..3: mod_base = OTHER; note = S-phosphorothioate
  modified_base 3: mod_base = OTHER; note = 2-fluororibose uracil
  modified_base 3..4: mod_base = OTHER; note = S-phosphorothioate
  modified_base 4: mod_base = OTHER; note = 2-fluororibose cytosine
  modified_base 4..5: mod_base = OTHER; note = S-phosphorothioate
  modified_base 5: mod_base = OTHER; note = 2-fluororibose uracil
  modified_base 5..6: mod_base = OTHER; note = S-phosphorothioate
  modified_base 6: mod_base = OTHER; note = 2-fluororibose cytosine
  modified_base 6..7: mod_base = OTHER; note = S-phosphorothioate
  modified_base 7: mod_base = OTHER; note = 2-fluororibose guanine
  modified_base 7..8: mod_base = OTHER; note = S-phosphorothioate
  modified_base 8: mod_base = OTHER; note = 2-fluororibose adenine
  modified_base 8..9: mod_base = OTHER; note = S-phosphorothioate
  modified_base 9: mod_base = OTHER; note = 2-fluororibose cytosine
  modified_base 9..10: mod_base = OTHER; note = S-phosphorothioate
  modified_base 10: mod_base = OTHER; note = 2-fluororibose uracil
  modified_base 10..11: mod_base = OTHER; note = S-phosphorothioate
  modified_base 11: mod_base = OTHER; note = 2-fluororibose uracil
  modified_base 11..12: mod_base = OTHER; note = S-phosphorothioate
  modified_base 12: mod_base = OTHER; note = 2-fluororibose adenine
  modified_base 12..13: mod_base = OTHER; note = S-phosphorothioate
  modified_base 13: mod_base = OTHER; note = 2-fluororibose cytosine
  modified_base 13..14: mod_base = OTHER; note = S-phosphorothioate
  modified_base 14: mod_base = OTHER; note = 2-fluororibose uracil
  modified_base 14..15: mod_base = OTHER; note = S-phosphorothioate
  modified_base 15: mod_base = OTHER; note = 2-fluororibose cytosine
  modified_base 15..16: mod_base = OTHER; note = S-phosphorothioate
  modified_base 16: mod_base = cm
  modified_base 16..17: mod_base = OTHER; note = S-phosphorothioate
  modified_base 17: mod_base = OTHER; note = 2-O-methylribose adenine
  modified_base 17..18: mod_base = OTHER; note = S-phosphorothioate
  modified_base 18: mod_base = OTHER; note = 2-O-methylribose adenine
  modified_base 18..19: mod_base = OTHER; note = S-phosphorothioate
  modified_base 19: mod_base = gm
  modified_base 19..20: mod_base = OTHER; note = S-phosphorothioate
  modified_base 20: mod_base = OTHER; note = 2-O-methylribose adenine
  modified_base 20..21: mod_base = OTHER; note = S-phosphorothioate
  modified_base 21: mod_base = um
  modified_base 21..22: mod_base = OTHER; note = S-phosphorothioate
  modified_base 22: mod_base = cm
  modified_base 22..23: mod_base = OTHER; note = S-phosphorothioate
  modified_base 23: mod_base = um
  modified_base 23..24: mod_base = OTHER; note = S-phosphorothioate
  modified_base 24: mod_base = OTHER; note = deoxyribose adenine
  modified_base 24..25: mod_base = OTHER; note = S-phosphorothioate
  modified_base 25: mod_base = OTHER; note = deoxyribose uracil (position 3 connectivity)
  modified_base 25..26: mod_base = OTHER; note = S-phosphorothioate
  modified_base 26: mod_base = OTHER; note = deoxyribose adenine
  modified_base 26..27: mod_base = OTHER; note R-N-(1,3-dimethylimidazolidin-2-ylidene)phosphoramidate
  modified_base 27: mod_base = um
  modified_base 27..28: mod_base = OTHER; note = S-phosphorothioate
  modified_base 28: mod_base = OTHER; note = 2-fluororibose cytosine
  modified_base 28..29: mod_base = OTHER; note = S-phosphorothioate
  modified_base 29: mod_base = um
  modified_base 29..30: mod_base = OTHER; note R-N-(1,3-dimethylimidazolidin-2-ylidene)phosphoramidate
  modified_base 30: mod_base = um
  source 1..30: mol_type = other RNA
cttctcgacttactccaagatctatatctt

SEQ ID NO: 643 - RNA, 30 nt, synthetic construct
  misc_feature 1..30: note = Synthetic: WV-47551
  misc_feature 1..30: note = Synthetic: ADR-0104843
  modified_base 1: mod_base = OTHER; note = 2-fluororibose cytosine
  modified_base 1..2: mod_base = OTHER; note R-N-(1,3-dimethylimidazolidin-2-ylidene)phosphoramidate
  modified_base 2: mod_base = OTHER; note = 2-fluororibose uracil
  modified_base 2..3: mod_base = OTHER; note = S-phosphorothioate
  modified_base 3: mod_base = OTHER; note = 2-fluororibose cytosine
  modified_base 3..4: mod_base = OTHER; note = S-phosphorothioate
  modified_base 4: mod_base = OTHER; note = 2-fluororibose guanine
  modified_base 4..5: mod_base = OTHER; note = S-phosphorothioate
  modified_base 5: mod_base = OTHER; note = 2-fluororibose adenine
  modified_base 5..6: mod_base = OTHER; note = S-phosphorothioate
  modified_base 6: mod_base = OTHER; note = 2-fluororibose cytosine
  modified_base 6..7: mod_base = OTHER; note = S-phosphorothioate
  modified_base 7: mod_base = OTHER; note = 2-fluororibose uracil
  modified_base 7..8: mod_base = OTHER; note = S-phosphorothioate
  modified_base 8: mod_base = OTHER; note = 2-fluororibose uracil
  modified_base 8..9: mod_base = OTHER; note = S-phosphorothioate
  modified_base 9: mod_base = OTHER; note = 2-fluororibose adenine
  modified_base 9..10: mod_base = OTHER; note = S-phosphorothioate
  modified_base 10: mod_base = OTHER; note = 2-fluororibose cytosine
  modified_base 10..11: mod_base = OTHER; note = S-phosphorothioate
  modified_base 11: mod_base = OTHER; note = 2-fluororibose uracil
  modified_base 11..12: mod_base = OTHER; note = S-phosphorothioate
  modified_base 12: mod_base = OTHER; note = 2-fluororibose cytosine
  modified_base 12..13: mod_base = OTHER; note = S-phosphorothioate
  modified_base 13: mod_base = OTHER; note = 2-fluororibose cytosine
  modified_base 13..14: mod_base = OTHER; note = S-phosphorothioate
  modified_base 14: mod_base = OTHER; note = 2-fluororibose adenine
  modified_base 14..15: mod_base = OTHER; note = S-phosphorothioate
  modified_base 15: mod_base = OTHER; note = 2-fluororibose adenine
  modified_base 15..16: mod_base = OTHER; note = S-phosphorothioate
  modified_base 16: mod_base = gm
  modified_base 16..17: mod_base = OTHER; note = S-phosphorothioate
  modified_base 17: mod_base = OTHER; note = 2-O-methylribose adenine
  modified_base 17..18: mod_base = OTHER; note = S-phosphorothioate
  modified_base 18: mod_base = um
  modified_base 18..19: mod_base = OTHER; note = S-phosphorothioate
  modified_base 19: mod_base = cm
  modified_base 19..20: mod_base = OTHER; note = S-phosphorothioate
  modified_base 20: mod_base = um
  modified_base 20..21: mod_base = OTHER; note = S-phosphorothioate
  modified_base 21: mod_base = OTHER; note = 2-O-methylribose adenine
  modified_base 21..22: mod_base = OTHER; note = S-phosphorothioate
  modified_base 22: mod_base = um
  modified_base 22..23: mod_base = OTHER; note = S-phosphorothioate
  modified_base 23: mod_base = OTHER; note = deoxyribose adenine
  modified_base 23..24: mod_base = OTHER; note = S-phosphorothioate
  modified_base 24: mod_base = OTHER; note = deoxyribose uracil (position 3 connectivity)
  modified_base 24..25: mod_base = OTHER; note = S-phosphorothioate
  modified_base 25: mod_base = OTHER; note = deoxyribose cytosine
  modified_base 25..26: mod_base = OTHER; note R-N-(1,3-dimethylimidazolidin-2-ylidene)phosphoramidate
  modified_base 26: mod_base = um
  modified_base 26..27: mod_base = OTHER; note = S-phosphorothioate
  modified_base 27: mod_base = OTHER; note = 2-fluororibose uracil
  modified_base 27..28: mod_base = OTHER; note = S-phosphorothioate
  modified_base 28: mod_base = gm
  modified_base 28..29: mod_base = OTHER; note = S-phosphorothioate
  modified_base 29: mod_base = cm
  modified_base 29..30: mod_base = OTHER; note R-N-(1,3-dimethylimidazolidin-2-ylidene)phosphoramidate
  modified_base 30: mod_base = cm
  source 1..30: mol_type = other RNA
ctcgacttactccaagatctatatcttgcc

SEQ ID NO: 644 - RNA, 30 nt, synthetic construct
  misc_feature 1..30: note = Synthetic: WV-47542
  misc_feature 1..30: note = Synthetic: ADR-0104852
  modified_base 1: mod_base = OTHER; note = 2-fluororibose uracil
  modified_base 1..2: mod_base = OTHER; note R-N-(1,3-dimethylimidazolidin-2-ylidene)phosphoramidate
  modified_base 2: mod_base = OTHER; note = 2-fluororibose cytosine
  modified_base 2..3: mod_base = OTHER; note = S-phosphorothioate
  modified_base 3: mod_base = OTHER; note = 2-fluororibose uracil
  modified_base 3..4: mod_base = OTHER; note = S-phosphorothioate
  modified_base 4: mod_base = OTHER; note = 2-fluororibose cytosine
  modified_base 4..5: mod_base = OTHER; note = S-phosphorothioate
  modified_base 5: mod_base = OTHER; note = 2-fluororibose guanine
  modified_base 5..6: mod_base = OTHER; note = S-phosphorothioate
  modified_base 6: mod_base = OTHER; note = 2-fluororibose adenine
  modified_base 6..7: mod_base = OTHER; note = S-phosphorothioate
  modified_base 7: mod_base = OTHER; note = 2-fluororibose cytosine
  modified_base 7..8: mod_base = OTHER; note = S-phosphorothioate
  modified_base 8: mod_base = OTHER; note = 2-fluororibose uracil
  modified_base 8..9: mod_base = OTHER; note = S-phosphorothioate
  modified_base 9: mod_base = OTHER; note = 2-fluororibose uracil
  modified_base 9..10: mod_base = OTHER; note = S-phosphorothioate
  modified_base 10: mod_base = OTHER; note = 2-fluororibose adenine
  modified_base 10..11: mod_base = OTHER; note = S-phosphorothioate
  modified_base 11: mod_base = OTHER; note = 2-fluororibose cytosine
  modified_base 11..12: mod_base = OTHER; note = S-phosphorothioate
  modified_base 12: mod_base = OTHER; note = 2-fluororibose uracil
  modified_base 12..13: mod_base = OTHER; note = S-phosphorothioate
  modified_base 13: mod_base = OTHER; note = 2-fluororibose cytosine
  modified_base 13..14: mod_base = OTHER; note = S-phosphorothioate
  modified_base 14: mod_base = OTHER; note = 2-fluororibose cytosine
  modified_base 14..15: mod_base = OTHER; note = S-phosphorothioate
  modified_base 15: mod_base = OTHER; note = 2-fluororibose adenine
  modified_base 15..16: mod_base = OTHER; note = S-phosphorothioate
  modified_base 16: mod_base = OTHER; note = 2-O-methylribose adenine
  modified_base 16..17: mod_base = OTHER; note = S-phosphorothioate
  modified_base 17: mod_base = gm
  modified_base 17..18: mod_base = OTHER; note = S-phosphorothioate
  modified_base 18: mod_base = OTHER; note = 2-O-methylribose adenine
  modified_base 18..19: mod_base = OTHER; note = S-phosphorothioate
  modified_base 19: mod_base = um
  modified_base 19..20: mod_base = OTHER; note = S-phosphorothioate
  modified_base 20: mod_base = cm
  modified_base 20..21: mod_base = OTHER; note = S-phosphorothioate
  modified_base 21: mod_base = um
  modified_base 21..22: mod_base = OTHER; note = S-phosphorothioate
  modified_base 22: mod_base = OTHER; note = 2-O-methylribose adenine
  modified_base 22..23: mod_base = OTHER; note = S-phosphorothioate
  modified_base 23: mod_base = um
  modified_base 23..24: mod_base = OTHER; note = S-phosphorothioate
  modified_base 24: mod_base = OTHER; note = deoxyribose adenine
  modified_base 24..25: mod_base = OTHER; note = S-phosphorothioate
  modified_base 25: mod_base = OTHER; note = deoxyribose uracil (position 3 connectivity)
  modified_base 25..26: mod_base = OTHER; note = S-phosphorothioate
  modified_base 26: mod_base = OTHER; note = deoxyribose cytosine
  modified_base 26..27: mod_base = OTHER; note R-N-(1,3-dimethylimidazolidin-2-ylidene)phosphoramidate
  modified_base 27: mod_base = um
  modified_base 27..28: mod_base = OTHER; note = S-phosphorothioate
  modified_base 28: mod_base = OTHER; note = 2-fluororibose uracil
  modified_base 28..29: mod_base = OTHER; note = S-phosphorothioate
  modified_base 29: mod_base = gm
  modified_base 29..30: mod_base = OTHER; note R-N-(1,3-dimethylimidazolidin-2-ylidene)phosphoramidate
  modified_base 30: mod_base = cm
  source 1..30: mol_type = other RNA
tctcgacttactccaagatctatatcttgc

SEQ ID NO: 645 - RNA, 30 nt, synthetic construct
  misc_feature 1..30: note = Synthetic: WV-47550
  misc_feature 1..30: note = Synthetic: ADR-0104847
  modified_base 1: mod_base = OTHER; note = 2-fluororibose guanine
  modified_base 1..2: mod_base = OTHER; note R-N-(1,3-dimethylimidazolidin-2-ylidene)phosphoramidate
  modified_base 2: mod_base = OTHER; note = 2-fluororibose adenine
  modified_base 2..3: mod_base = OTHER; note = S-phosphorothioate
  modified_base 3: mod_base = OTHER; note = 2-fluororibose cytosine
  modified_base 3..4: mod_base = OTHER; note = S-phosphorothioate
  modified_base 4: mod_base = OTHER; note = 2-fluororibose uracil
  modified_base 4..5: mod_base = OTHER; note = S-phosphorothioate
  modified_base 5: mod_base = OTHER; note = 2-fluororibose uracil
  modified_base 5..6: mod_base = OTHER; note = S-phosphorothioate
  modified_base 6: mod_base = OTHER; note = 2-fluororibose adenine
  modified_base 6..7: mod_base = OTHER; note = S-phosphorothioate
  modified_base 7: mod_base = OTHER; note = 2-fluororibose cytosine
  modified_base 7..8: mod_base = OTHER; note = S-phosphorothioate
  modified_base 8: mod_base = OTHER; note = 2-fluororibose uracil
  modified_base 8..9: mod_base = OTHER; note = S-phosphorothioate
  modified_base 9: mod_base = OTHER; note = 2-fluororibose cytosine
  modified_base 9..10: mod_base = OTHER; note = S-phosphorothioate
  modified_base 10: mod_base = OTHER; note = 2-fluororibose cytosine
  modified_base 10..11: mod_base = OTHER; note = S-phosphorothioate
  modified_base 11: mod_base = OTHER; note = 2-fluororibose adenine
  modified_base 11..12: mod_base = OTHER; note = S-phosphorothioate
  modified_base 12: mod_base = OTHER; note = 2-fluororibose adenine
  modified_base 12..13: mod_base = OTHER; note = S-phosphorothioate
  modified_base 13: mod_base = OTHER; note = 2-fluororibose guanine
  modified_base 13..14: mod_base = OTHER; note = S-phosphorothioate
  modified_base 14: mod_base = OTHER; note = 2-fluororibose adenine
  modified_base 14..15: mod_base = OTHER; note = S-phosphorothioate
  modified_base 15: mod_base = OTHER; note = 2-fluororibose uracil
  modified_base 15..16: mod_base = OTHER; note = S-phosphorothioate
  modified_base 16: mod_base = cm
  modified_base 16..17: mod_base = OTHER; note = S-phosphorothioate
  modified_base 17: mod_base = um
  modified_base 17..18: mod_base = OTHER; note = S-phosphorothioate
  modified_base 18: mod_base = OTHER; note = 2-O-methylribose adenine
  modified_base 18..19: mod_base = OTHER; note = S-phosphorothioate
  modified_base 19: mod_base = um
  modified_base 19..20: mod_base = OTHER; note = S-phosphorothioate
  modified_base 20: mod_base = OTHER; note = 2-O-methylribose adenine
  modified_base 20..21: mod_base = OTHER; note = S-phosphorothioate
  modified_base 21: mod_base = um
  modified_base 21..22: mod_base = OTHER; note = S-phosphorothioate
  modified_base 22: mod_base = cm
  modified_base 22..23: mod_base = OTHER; note = S-phosphorothioate
  modified_base 23: mod_base = OTHER; note = deoxyribose thymine
  modified_base 23..24: mod_base = OTHER; note = S-phosphorothioate
  modified_base 24: mod_base = OTHER; note = deoxyribose uracil (position 3 connectivity)
  modified_base 24..25: mod_base = OTHER; note = S-phosphorothioate
  modified_base 25: mod_base = OTHER; note = deoxyribose guanine
  modified_base 25..26: mod_base = OTHER; note R-N-(1,3-dimethylimidazolidin-2-ylidene)phosphoramidate
  modified_base 26: mod_base = cm
  modified_base 26..27: mod_base = OTHER; note = S-phosphorothioate
  modified_base 27: mod_base = OTHER; note = 2-fluororibose cytosine
  modified_base 27..28: mod_base = OTHER; note = S-phosphorothioate
  modified_base 28: mod_base = um
  modified_base 28..29: mod_base = OTHER; note = S-phosphorothioate
  modified_base 29: mod_base = cm
  modified_base 29..30: mod_base = OTHER; note R-N-(1,3-dimethylimidazolidin-2-ylidene)phosphoramidate
  modified_base 30: mod_base = cm
  source 1..30: mol_type = other RNA
gacttactccaagatctatatcttgcctcc

SEQ ID NO: 646 - RNA, 30 nt, synthetic construct
  misc_feature 1..30: note = Synthetic: WV-47541
  misc_feature 1..30: note = Synthetic: ADR-0104842
  modified_base 1: mod_base = OTHER; note = 2-fluororibose cytosine
  modified_base 1..2: mod_base = OTHER; note R-N-(1,3-dimethylimidazolidin-2-ylidene)phosphoramidate
  modified_base 2: mod_base = OTHER; note = 2-fluororibose guanine
  modified_base 2..3: mod_base = OTHER; note = S-phosphorothioate
  modified_base 3: mod_base = OTHER; note = 2-fluororibose adenine
  modified_base 3..4: mod_base = OTHER; note = S-phosphorothioate
  modified_base 4: mod_base = OTHER; note = 2-fluororibose cytosine
  modified_base 4..5: mod_base = OTHER; note = S-phosphorothioate
  modified_base 5: mod_base = OTHER; note = 2-fluororibose uracil
  modified_base 5..6: mod_base = OTHER; note = S-phosphorothioate
  modified_base 6: mod_base = OTHER; note = 2-fluororibose uracil
  modified_base 6..7: mod_base = OTHER; note = S-phosphorothioate
  modified_base 7: mod_base = OTHER; note = 2-fluororibose adenine
  modified_base 7..8: mod_base = OTHER; note = S-phosphorothioate
  modified_base 8: mod_base = OTHER; note = 2-fluororibose cytosine
  modified_base 8..9: mod_base = OTHER; note = S-phosphorothioate
  modified_base 9: mod_base = OTHER; note = 2-fluororibose uracil
  modified_base 9..10: mod_base = OTHER; note = S-phosphorothioate
  modified_base 10: mod_base = OTHER; note = 2-fluororibose cytosine
  modified_base 10..11: mod_base = OTHER; note = S-phosphorothioate
  modified_base 11: mod_base = OTHER; note = 2-fluororibose cytosine
  modified_base 11..12: mod_base = OTHER; note = S-phosphorothioate
  modified_base 12: mod_base = OTHER; note = 2-fluororibose adenine
  modified_base 12..13: mod_base = OTHER; note = S-phosphorothioate
  modified_base 13: mod_base = OTHER; note = 2-fluororibose adenine
  modified_base 13..14: mod_base = OTHER; note = S-phosphorothioate
  modified_base 14: mod_base = OTHER; note = 2-fluororibose guanine
  modified_base 14..15: mod_base = OTHER; note = S-phosphorothioate
  modified_base 15: mod_base = OTHER; note = 2-fluororibose adenine
  modified_base 15..16: mod_base = OTHER; note = S-phosphorothioate
  modified_base 16: mod_base = um
  modified_base 16..17: mod_base = OTHER; note = S-phosphorothioate
  modified_base 17: mod_base = cm
  modified_base 17..18: mod_base = OTHER; note = S-phosphorothioate
  modified_base 18: mod_base = um
  modified_base 18..19: mod_base = OTHER; note = S-phosphorothioate
  modified_base 19: mod_base = OTHER; note = 2-O-methylribose adenine
  modified_base 19..20: mod_base = OTHER; note = S-phosphorothioate
  modified_base 20: mod_base = um
  modified_base 20..21: mod_base = OTHER; note = S-phosphorothioate
  modified_base 21: mod_base = OTHER; note = 2-O-methylribose adenine
  modified_base 21..22: mod_base = OTHER; note = S-phosphorothioate
  modified_base 22: mod_base = um
  modified_base 22..23: mod_base = OTHER; note = S-phosphorothioate
  modified_base 23: mod_base = cm
  modified_base 23..24: mod_base = OTHER; note = S-phosphorothioate
  modified_base 24: mod_base = OTHER; note = deoxyribose thymine
  modified_base 24..25: mod_base = OTHER; note = S-phosphorothioate
  modified_base 25: mod_base = OTHER; note = deoxyribose uracil (position 3 connectivity)
  modified_base 25..26: mod_base = OTHER; note = S-phosphorothioate
  modified_base 26: mod_base = OTHER; note = deoxyribose guanine
  modified_base 26..27: mod_base = OTHER; note R-N-(1,3-dimethylimidazolidin-2-ylidene)phosphoramidate
  modified_base 27: mod_base = cm
  modified_base 27..28: mod_base = OTHER; note = S-phosphorothioate
  modified_base 28: mod_base = OTHER; note = 2-fluororibose cytosine
  modified_base 28..29: mod_base = OTHER; note = S-phosphorothioate
  modified_base 29: mod_base = um
  modified_base 29..30: mod_base = OTHER; note R-N-(1,3-dimethylimidazolidin-2-ylidene)phosphoramidate
  modified_base 30: mod_base = cm
  source 1..30: mol_type = other RNA
cgacttactccaagatctatatcttgcctc

SEQ ID NO: 647 - RNA, 30 nt, synthetic construct; identical to SEQ ID NO: 1
  misc_feature 1..30: note = Synthetic: WV-48161
  misc_feature 1..30: note = Synthetic: ADR-0100579
  modified_base 1: mod_base = OTHER; note = triantennary GalNAc with C12 linker linked to 6-aminohexanol linked by phosphate to the 5' end of 2-O-methylribose adenine
  modified_base 1..2: mod_base = OTHER; note R-N-(1,3-dimethylimidazolidin-2-ylidene)phosphoramidate
  modified_base 2: mod_base = um
  modified_base 2..3: mod_base = OTHER; note = S-phosphorothioate
  modified_base 3: mod_base = cm
  modified_base 3..4: mod_base = OTHER; note = S-phosphorothioate
  modified_base 4: mod_base = OTHER; note = 2-fluororibose cytosine
  modified_base 4..5: mod_base = OTHER; note = S-phosphorothioate
  modified_base 5: mod_base = OTHER; note = 2-fluororibose adenine
  modified_base 5..6: mod_base = OTHER; note = S-phosphorothioate
  modified_base 6: mod_base = OTHER; note = 2-fluororibose cytosine
  modified_base 6..7: mod_base = OTHER; note = S-phosphorothioate
  modified_base 7: mod_base = um
  modified_base 8: mod_base = OTHER; note = 2-fluororibose guanine
  modified_base 8..9: mod_base = OTHER; note = S-phosphorothioate
  modified_base 9: mod_base = OTHER; note = 2-fluororibose uracil
  modified_base 9..10: mod_base = OTHER; note = S-phosphorothioate
  modified_base 10: mod_base = OTHER; note = 2-fluororibose guanine
  modified_base 10..11: mod_base = OTHER; note = S-phosphorothioate
  modified_base 11: mod_base = OTHER; note = 2-fluororibose guanine
  modified_base 11..12: mod_base = OTHER; note = S-phosphorothioate
  modified_base 12: mod_base = OTHER; note = 2-fluororibose cytosine
  modified_base 12..13: mod_base = OTHER; note R-N-(1,3-dimethylimidazolidin-2-ylidene)phosphoramidate
  modified_base 13: mod_base = OTHER; note = 2-fluororibose adenine
  modified_base 13..14: mod_base = OTHER; note = S-phosphorothioate
  modified_base 14: mod_base = OTHER; note = 2-fluororibose cytosine
  modified_base 15: mod_base = OTHER; note = 2-fluororibose cytosine
  modified_base 15..16: mod_base = OTHER; note R-N-(1,3-dimethylimidazolidin-2-ylidene)phosphoramidate
  modified_base 16: mod_base = OTHER; note = 2-fluororibose cytosine
  modified_base 16..17: mod_base = OTHER; note = S-phosphorothioate
  modified_base 17: mod_base = OTHER; note = 2-fluororibose adenine
  modified_base 17..18: mod_base = OTHER; note = S-phosphorothioate
  modified_base 18: mod_base = OTHER; note = 2-fluororibose guanine
  modified_base 18..19: mod_base = OTHER; note = S-phosphorothioate
  modified_base 19: mod_base = OTHER; note = 2-fluororibose adenine
  modified_base 19..20: mod_base = OTHER; note = S-phosphorothioate
  modified_base 20: mod_base = OTHER; note = 2-fluororibose uracil
  modified_base 20..21: mod_base = OTHER; note = S-phosphorothioate
  modified_base 21: mod_base = um
  modified_base 22: mod_base = OTHER; note = 2-fluororibose adenine
  modified_base 22..23: mod_base = OTHER; note = S-phosphorothioate
  modified_base 23: mod_base = OTHER; note = 2-fluororibose uracil
  modified_base 23..24: mod_base = OTHER; note = S-phosphorothioate
  modified_base 24: mod_base = OTHER; note = 2-fluororibose cytosine
  modified_base 24..25: mod_base = OTHER; note = S-phosphorothioate
  modified_base 25: mod_base = OTHER; note = deoxyribose cytosine
  modified_base 25..26: mod_base = OTHER; note = S-phosphorothioate
  modified_base 26: mod_base = OTHER; note = deoxyribose adenine
  modified_base 26..27: mod_base = OTHER; note R-N-(1,3-dimethylimidazolidin-2-ylidene)phosphoramidate
  modified_base 27: mod_base = um
  modified_base 28: mod_base = OTHER; note = 2-fluororibose guanine
  modified_base 28..29: mod_base = OTHER; note = S-phosphorothioate
  modified_base 29: mod_base = um
  modified_base 29..30: mod_base = OTHER; note R-N-(1,3-dimethylimidazolidin-2-ylidene)phosphoramidate
  modified_base 30: mod_base = um
  source 1..30: mol_type = other RNA

SEQ ID NO: 648 - RNA, 30 nt, synthetic construct; identical to SEQ ID NO: 1
  misc_feature 1..30: note = Synthetic: WV-48162
  misc_feature 1..30: note = Synthetic: ADR-0100580
  modified_base 1: mod_base = OTHER; note = triantennary GalNAc with C12 linker linked to 6-aminohexanol linked by phosphate to the 5' end of 2-O-methylribose adenine
  modified_base 1..2: mod_base = OTHER; note R-N-(1,3-dimethylimidazolidin-2-ylidene)phosphoramidate
  modified_base 2: mod_base = um
  modified_base 2..3: mod_base = OTHER; note = S-phosphorothioate
  modified_base 3: mod_base = cm
  modified_base 3..4: mod_base = OTHER; note = S-phosphorothioate
  modified_base 4: mod_base = OTHER; note = 2-fluororibose cytosine
  modified_base 4..5: mod_base = OTHER; note = S-phosphorothioate
  modified_base 5: mod_base = OTHER; note = 2-fluororibose adenine
  modified_base 5..6: mod_base = OTHER; note = S-phosphorothioate
  modified_base 6: mod_base = OTHER; note = 2-fluororibose cytosine
  modified_base 6..7: mod_base = OTHER; note = S-phosphorothioate
  modified_base 7: mod_base = OTHER; note = 2-fluororibose uracil
  modified_base 8: mod_base = gm
  modified_base 8..9: mod_base = OTHER; note = S-phosphorothioate
  modified_base 9: mod_base = OTHER; note = 2-fluororibose uracil
  modified_base 9..10: mod_base = OTHER; note = S-phosphorothioate
  modified_base 10: mod_base = OTHER; note = 2-fluororibose guanine
  modified_base 11: mod_base = gm
  modified_base 11..12: mod_base = OTHER; note = S-phosphorothioate
  modified_base 12: mod_base = OTHER; note = 2-fluororibose cytosine
  modified_base 12..13: mod_base = OTHER; note R-N-(1,3-dimethylimidazolidin-2-ylidene)phosphoramidate
  modified_base 13: mod_base = OTHER; note = 2-O-methylribose adenine
  modified_base 14: mod_base = OTHER; note = 2-fluororibose cytosine
  modified_base 14..15: mod_base = OTHER; note = S-phosphorothioate
  modified_base 15: mod_base = OTHER; note = 2-fluororibose cytosine
  modified_base 15..16: mod_base = OTHER; note R-N-(1,3-dimethylimidazolidin-2-ylidene)phosphoramidate
  modified_base 16: mod_base = OTHER; note = 2-fluororibose cytosine
  modified_base 17: mod_base = OTHER; note = 2-O-methylribose adenine
  modified_base 17..18: mod_base = OTHER; note = S-phosphorothioate
  modified_base 18: mod_base = OTHER; note = 2-fluororibose guanine
  modified_base 18..19: mod_base = OTHER; note = S-phosphorothioate
  modified_base 19: mod_base = OTHER; note = 2-fluororibose adenine
  modified_base 19..20: mod_base = OTHER; note = S-phosphorothioate
  modified_base 20: mod_base = OTHER; note = 2-fluororibose uracil
  modified_base 20..21: mod_base = OTHER; note R-N-(1,3-dimethylimidazolidin-2-ylidene)phosphoramidate
  modified_base 21: mod_base = OTHER; note = 2-fluororibose uracil
  modified_base 21..22: mod_base = OTHER; note = S-phosphorothioate
  modified_base 22: mod_base = OTHER; note = 2-O-methylribose adenine
  modified_base 23: mod_base = OTHER; note = 2-fluororibose uracil
  modified_base 23..24: mod_base = OTHER; note = S-phosphorothioate
  modified_base 24: mod_base = OTHER; note = 2-fluororibose cytosine
  modified_base 24..25: mod_base = OTHER; note = S-phosphorothioate
  modified_base 25: mod_base = OTHER; note = deoxyribose cytosine
  modified_base 25..26: mod_base = OTHER; note = S-phosphorothioate
  modified_base 26: mod_base = OTHER; note = deoxyribose adenine
  modified_base 26..27: mod_base = OTHER; note R-N-(1,3-dimethylimidazolidin-2-ylidene)phosphoramidate
  modified_base 27: mod_base = um
  modified_base 28: mod_base = OTHER; note = 2-fluororibose guanine
  modified_base 28..29: mod_base = OTHER; note = S-phosphorothioate
  modified_base 29: mod_base = um
  modified_base 29..30: mod_base = OTHER; note R-N-(1,3-dimethylimidazolidin-2-ylidene)phosphoramidate
  modified_base 30: mod_base = um
  source 1..30: mol_type = other RNA

SEQ ID NO: 649 - RNA, 30 nt, synthetic construct; identical to SEQ ID NO: 1
  misc_feature 1..30: note = Synthetic: WV-48164
  misc_feature 1..30: note = Synthetic: ADR-0100582
  modified_base 1: mod_base = OTHER; note = triantennary GalNAc with C12 linker linked to 6-aminohexanol linked by phosphate to the 5' end of 2-O-methylribose adenine
  modified_base 1..2: mod_base = OTHER; note R-N-(1,3-dimethylimidazolidin-2-ylidene)phosphoramidate
  modified_base 2: mod_base = um
  modified_base 2..3: mod_base = OTHER; note = S-phosphorothioate
  modified_base 3: mod_base = cm
  modified_base 3..4: mod_base = OTHER; note = S-phosphorothioate
  modified_base 4: mod_base = OTHER; note = 2-fluororibose cytosine
  modified_base 4..5: mod_base = OTHER; note = S-phosphorothioate
  modified_base 5: mod_base = OTHER; note = 2-fluororibose adenine
  modified_base 5..6: mod_base = OTHER; note = S-phosphorothioate
  modified_base 6: mod_base = cm
  modified_base 7: mod_base = um
  modified_base 7..8: mod_base = OTHER; note = S-phosphorothioate
  modified_base 8: mod_base = OTHER; note = 2-fluororibose guanine
  modified_base 8..9: mod_base = OTHER; note = S-phosphorothioate
  modified_base 9: mod_base = OTHER; note = 2-fluororibose uracil
  modified_base 10: mod_base = gm
  modified_base 10..11: mod_base = OTHER; note = S-phosphorothioate
  modified_base 11: mod_base = OTHER; note = 2-fluororibose guanine
  modified_base 11..12: mod_base = OTHER; note R-N-(1,3-dimethylimidazolidin-2-ylidene)phosphoramidate
  modified_base 12: mod_base = cm
  modified_base 13: mod_base = OTHER; note = 2-fluororibose adenine
  modified_base 13..14: mod_base = OTHER; note = S-phosphorothioate
  modified_base 14: mod_base = OTHER; note = 2-fluororibose cytosine
  modified_base 14..15: mod_base = OTHER; note R-N-(1,3-dimethylimidazolidin-2-ylidene)phosphoramidate
  modified_base 15: mod_base = OTHER; note = 2-fluororibose cytosine
  modified_base 16: mod_base = cm
  modified_base 16..17: mod_base = OTHER; note = S-phosphorothioate
  modified_base 17: mod_base = OTHER; note = 2-fluororibose adenine
  modified_base 17..18: mod_base = OTHER; note = S-phosphorothioate
  modified_base 18: mod_base = OTHER; note = 2-fluororibose guanine
  modified_base 18..19: mod_base = OTHER; note = S-phosphorothioate
  modified_base 19: mod_base = OTHER; note = 2-fluororibose adenine
  modified_base 19..20: mod_base = OTHER; note = S-phosphorothioate
  modified_base 20: mod_base = um
  modified_base 21: mod_base = um
  modified_base 22: mod_base = OTHER; note = 2-fluororibose adenine
  modified_base 22..23: mod_base = OTHER; note = S-phosphorothioate
  modified_base 23: mod_base = OTHER; note = 2-fluororibose uracil
  modified_base 23..24: mod_base = OTHER; note = S-phosphorothioate
  modified_base 24: mod_base = OTHER; note = deoxyribose cytosine
  modified_base 24..25: mod_base = OTHER; note = S-phosphorothioate
  modified_base 25: mod_base = OTHER; note = deoxyribose cytosine
  modified_base 25..26: mod_base = OTHER; note = S-phosphorothioate
  modified_base 26: mod_base = OTHER; note = deoxyribose adenine
  modified_base 26..27: mod_base = OTHER; note R-N-(1,3-dimethylimidazolidin-2-ylidene)phosphoramidate
  modified_base 27: mod_base = um
  modified_base 28: mod_base = OTHER; note = 2-fluororibose guanine
  modified_base 28..29: mod_base = OTHER; note = S-phosphorothioate
  modified_base 29: mod_base = um
  modified_base 29..30: mod_base = OTHER; note R-N-(1,3-dimethylimidazolidin-2-ylidene)phosphoramidate
  modified_base 30: mod_base = um
  source 1..30: mol_type = other RNA

SEQ ID NO: 650 - RNA, 30 nt, synthetic construct; identical to SEQ ID NO: 1
  misc_feature 1..30: note = Synthetic: WV-47046
  misc_feature 1..30: note = Synthetic: ADR-0102506
  modified_base 1: mod_base = OTHER; note = 2-O-methylribose adenine
  modified_base 1..2: mod_base = OTHER; note R-N-(1,3-dimethylimidazolidin-2-ylidene)phosphoramidate
  modified_base 2: mod_base = um
  modified_base 2..3: mod_base = OTHER; note = S-phosphorothioate
  modified_base 3: mod_base = cm
  modified_base 3..4: mod_base = OTHER; note = S-phosphorothioate
  modified_base 4: mod_base = OTHER; note = 2-fluororibose cytosine
  modified_base 4..5: mod_base = OTHER; note = S-phosphorothioate
  modified_base 5: mod_base = OTHER; note = 2-fluororibose adenine
  modified_base 5..6: mod_base = OTHER; note = S-phosphorothioate
  modified_base 6: mod_base = OTHER; note = 2-fluororibose cytosine
  modified_base 6..7: mod_base = OTHER; note = S-phosphorothioate
  modified_base 7: mod_base = um
  modified_base 8: mod_base = OTHER; note = 2-fluororibose guanine
  modified_base 8..9: mod_base = OTHER; note = S-phosphorothioate
  modified_base 9: mod_base = OTHER; note = 2-fluororibose uracil
  modified_base 9..10: mod_base = OTHER; note = S-phosphorothioate
  modified_base 10: mod_base = OTHER; note = 2-fluororibose guanine
  modified_base 10..11: mod_base = OTHER; note = S-phosphorothioate
  modified_base 11: mod_base = OTHER; note = 2-fluororibose guanine
  modified_base 11..12: mod_base = OTHER; note = S-phosphorothioate
  modified_base 12: mod_base = OTHER; note = 2-fluororibose cytosine
  modified_base 12..13: mod_base = OTHER; note R-N-(1,3-dimethylimidazolidin-2-ylidene)phosphoramidate
  modified_base 13: mod_base = OTHER; note = 2-fluororibose adenine
  modified_base 13..14: mod_base = OTHER; note = S-phosphorothioate
  modified_base 14: mod_base = OTHER; note = 2-fluororibose cytosine
  modified_base 15: mod_base = OTHER; note = 2-fluororibose cytosine
  modified_base 15..16: mod_base = OTHER; note R-N-(1,3-dimethylimidazolidin-2-ylidene)phosphoramidate
  modified_base 16: mod_base = OTHER; note = 2-fluororibose cytosine
  modified_base 16..17: mod_base = OTHER; note = S-phosphorothioate
  modified_base 17: mod_base = OTHER; note = 2-fluororibose adenine
  modified_base 17..18: mod_base = OTHER; note = S-phosphorothioate
  modified_base 18: mod_base = OTHER; note = 2-fluororibose guanine
  modified_base 18..19: mod_base = OTHER; note = S-phosphorothioate
  modified_base 19: mod_base = OTHER; note = 2-fluororibose adenine
  modified_base 19..20: mod_base = OTHER; note = S-phosphorothioate
  modified_base 20: mod_base = OTHER; note = 2-fluororibose uracil
  modified_base 20..21: mod_base = OTHER; note = S-phosphorothioate
  modified_base 21: mod_base = um
  modified_base 22: mod_base = OTHER; note = 2-fluororibose adenine
  modified_base 22..23: mod_base = OTHER; note = S-phosphorothioate
  modified_base 23: mod_base = OTHER; note = 2-fluororibose uracil
  modified_base 23..24: mod_base = OTHER; note = S-phosphorothioate
  modified_base 24: mod_base = OTHER; note = 2-fluororibose cytosine
  modified_base 24..25: mod_base = OTHER; note = S-phosphorothioate
  modified_base 25: mod_base = OTHER; note = deoxyribose cytosine
  modified_base 25..26: mod_base = OTHER; note = S-phosphorothioate
  modified_base 26: mod_base = OTHER; note = deoxyribose adenine
  modified_base 26..27: mod_base = OTHER; note R-N-(1,3-dimethylimidazolidin-2-ylidene)phosphoramidate
  modified_base 27: mod_base = um
  modified_base 28: mod_base = OTHER; note = 2-fluororibose guanine
  modified_base 28..29: mod_base = OTHER; note = S-phosphorothioate
  modified_base 29: mod_base = um
  modified_base 29..30: mod_base = OTHER; note R-N-(1,3-dimethylimidazolidin-2-ylidene)phosphoramidate
  modified_base 30: mod_base = um
  source 1..30: mol_type = other RNA

SEQ ID NO: 651 - RNA, 30 nt, synthetic construct; identical to SEQ ID NO: 1
  misc_feature 1..30: note = Synthetic: WV-47053
  misc_feature 1..30: note = Synthetic: ADR-0102551
  modified_base 1: mod_base = OTHER; note = 2-O-methylribose adenine
  modified_base 1..2: mod_base = OTHER; note R-N-(1,3-dimethylimidazolidin-2-ylidene)phosphoramidate
  modified_base 2: mod_base = um
  modified_base 2..3: mod_base = OTHER; note = S-phosphorothioate
  modified_base 3: mod_base = cm
  modified_base 3..4: mod_base = OTHER; note = S-phosphorothioate
  modified_base 4: mod_base = OTHER; note = 2-fluororibose cytosine
  modified_base 4..5: mod_base = OTHER; note = S-phosphorothioate
  modified_base 5: mod_base = OTHER; note = 2-fluororibose adenine
  modified_base 5..6: mod_base = OTHER; note = S-phosphorothioate
  modified_base 6: mod_base = cm
  modified_base 7: mod_base = um
  modified_base 8: mod_base = OTHER; note = 2-fluororibose guanine
  modified_base 8..9: mod_base = OTHER; note = S-phosphorothioate
  modified_base 9: mod_base = OTHER; note = 2-fluororibose uracil
  modified_base 9..10: mod_base = OTHER; note = S-phosphorothioate
  modified_base 10: mod_base = gm
  modified_base 11: mod_base = OTHER; note = 2-fluororibose guanine
  modified_base 11..12: mod_base = OTHER; note R-N-(1,3-dimethylimidazolidin-2-ylidene)phosphoramidate
  modified_base 12: mod_base = cm
  modified_base 13: mod_base = OTHER; note = 2-fluororibose adenine
  modified_base 13..14: mod_base = OTHER; note = S-phosphorothioate
  modified_base 14: mod_base = OTHER; note = 2-fluororibose cytosine
  modified_base 14..15: mod_base = OTHER; note R-N-(1,3-dimethylimidazolidin-2-ylidene)phosphoramidate
  modified_base 15: mod_base = OTHER; note = 2-fluororibose cytosine
  modified_base 16: mod_base = cm
  modified_base 16..17: mod_base = OTHER; note = S-phosphorothioate
  modified_base 17: mod_base = OTHER; note = 2-fluororibose adenine
  modified_base 17..18: mod_base = OTHER; note = S-phosphorothioate
  modified_base 18: mod_base = OTHER; note = 2-fluororibose guanine
  modified_base 18..19: mod_base = OTHER; note = S-phosphorothioate
  modified_base 19: mod_base = OTHER; note = 2-fluororibose adenine
  modified_base 19..20: mod_base = OTHER; note R-N-(1,3-dimethylimidazolidin-2-ylidene)phosphoramidate
  modified_base 20: mod_base = um
  modified_base 21: mod_base = um
  modified_base 22: mod_base = OTHER; note = 2-fluororibose adenine
  modified_base 22..23: mod_base = OTHER; note = S-phosphorothioate
  modified_base 23: mod_base = OTHER; note = 2-fluororibose uracil
  modified_base 23..24: mod_base = OTHER; note = S-phosphorothioate
  modified_base 24: mod_base = OTHER; note = deoxyribose cytosine
  modified_base 24..25: mod_base = OTHER; note = S-phosphorothioate
  modified_base 25: mod_base = OTHER; note = deoxyribose cytosine
  modified_base 25..26: mod_base = OTHER; note = S-phosphorothioate
  modified_base 26: mod_base = OTHER; note = deoxyribose adenine
  modified_base 26..27: mod_base = OTHER; note R-N-(1,3-dimethylimidazolidin-2-ylidene)phosphoramidate
  modified_base 27: mod_base = um
  modified_base 28: mod_base = OTHER; note = 2-fluororibose guanine
  modified_base 28..29: mod_base = OTHER; note = S-phosphorothioate
  modified_base 29: mod_base = um
  modified_base 29..30: mod_base = OTHER; note R-N-(1,3-dimethylimidazolidin-2-ylidene)phosphoramidate
  modified_base 30: mod_base = um
  source 1..30: mol_type = other RNA

SEQ ID NO: 652 - RNA, 30 nt, synthetic construct; identical to SEQ ID NO: 1
  misc_feature 1..30: note = Synthetic: WV-47049
  misc_feature 1..30: note = Synthetic: ADR-0102548
  modified_base 1: mod_base = OTHER; note = 2-O-methylribose adenine
  modified_base 1..2: mod_base = OTHER; note R-N-(1,3-dimethylimidazolidin-2-ylidene)phosphoramidate
  modified_base 2: mod_base = um
  modified_base 2..3: mod_base = OTHER; note = S-phosphorothioate
  modified_base 3: mod_base = cm
  modified_base 3..4: mod_base = OTHER; note = S-phosphorothioate
  modified_base 4: mod_base = OTHER; note = 2-fluororibose cytosine
  modified_base 4..5: mod_base = OTHER; note = S-phosphorothioate
  modified_base 5: mod_base = OTHER; note = 2-fluororibose adenine
  modified_base 5..6: mod_base = OTHER; note = S-phosphorothioate
  modified_base 6: mod_base = OTHER; note = 2-fluororibose cytosine
  modified_base 7: mod_base = um
  modified_base 7..8: mod_base = OTHER; note = S-phosphorothioate
  modified_base 8: mod_base = OTHER; note = 2-fluororibose guanine
  modified_base 8..9: mod_base = OTHER; note = S-phosphorothioate
  modified_base 9: mod_base = OTHER; note = 2-fluororibose uracil
  modified_base 10: mod_base = gm
  modified_base 10..11: mod_base = OTHER; note = S-phosphorothioate
  modified_base 11: mod_base = OTHER; note = 2-fluororibose guanine
  modified_base 11..12: mod_base = OTHER; note R-N-(1,3-dimethylimidazolidin-2-ylidene)phosphoramidate
  modified_base 12: mod_base = cm
  modified_base 13: mod_base = OTHER; note = 2-fluororibose adenine
  modified_base 13..14: mod_base = OTHER; note = S-phosphorothioate
  modified_base 14: mod_base = OTHER; note = 2-fluororibose cytosine
  modified_base 14..15: mod_base = OTHER; note R-N-(1,3-dimethylimidazolidin-2-ylidene)phosphoramidate
  modified_base 15: mod_base = OTHER; note = 2-fluororibose cytosine
  modified_base 16: mod_base = cm
  modified_base 16..17: mod_base = OTHER; note = S-phosphorothioate
  modified_base 17: mod_base = OTHER; note = 2-fluororibose adenine
  modified_base 17..18: mod_base = OTHER; note = S-phosphorothioate
  modified_base 18: mod_base = OTHER; note = 2-fluororibose guanine
  modified_base 18..19: mod_base = OTHER; note = S-phosphorothioate
  modified_base 19: mod_base = OTHER; note = 2-fluororibose adenine
  modified_base 19..20: mod_base = OTHER; note R-N-(1,3-dimethylimidazolidin-2-ylidene)phosphoramidate
  modified_base 20: mod_base = OTHER; note = 2-fluororibose uracil
  modified_base 20..21: mod_base = OTHER; note = S-phosphorothioate
  modified_base 21: mod_base = um
  modified_base 22: mod_base = OTHER; note = 2-fluororibose adenine
  modified_base 22..23: mod_base = OTHER; note = S-phosphorothioate
  modified_base 23: mod_base = OTHER; note = 2-fluororibose uracil
  modified_base 23..24: mod_base = OTHER; note = S-phosphorothioate
  modified_base 24: mod_base = OTHER; note = 2-fluororibose cytosine
  modified_base 24..25: mod_base = OTHER; note = S-phosphorothioate
  modified_base 25: mod_base = OTHER; note = deoxyribose cytosine
  modified_base 25..26: mod_base = OTHER; note = S-phosphorothioate
  modified_base 26: mod_base = OTHER; note = deoxyribose adenine
  modified_base 26..27: mod_base = OTHER; note R-N-(1,3-dimethylimidazolidin-2-ylidene)phosphoramidate
  modified_base 27: mod_base = um
  modified_base 28: mod_base = OTHER; note = 2-fluororibose guanine
  modified_base 28..29: mod_base = OTHER; note = S-phosphorothioate
  modified_base 29: mod_base = um
  modified_base 29..30: mod_base = OTHER; note R-N-(1,3-dimethylimidazolidin-2-ylidene)phosphoramidate
  modified_base 30: mod_base = um
  source 1..30: mol_type = other RNA

SEQ ID NO: 653 - RNA, 30 nt, synthetic construct; identical to SEQ ID NO: 1
  misc_feature 1..30: note = Synthetic: WV-47044
  misc_feature 1..30: note = Synthetic: ADR-0102485
  modified_base 1: mod_base = OTHER; note = 2-O-methylribose adenine
  modified_base 1..2: mod_base = OTHER; note R-N-(1,3-dimethylimidazolidin-2-ylidene)phosphoramidate
  modified_base 2: mod_base = um
  modified_base 2..3: mod_base = OTHER; note = S-phosphorothioate
  modified_base 3: mod_base = cm
  modified_base 3..4: mod_base = OTHER; note = S-phosphorothioate
  modified_base 4: mod_base = OTHER; note = 2-fluororibose cytosine
  modified_base 4..5: mod_base = OTHER; note = S-phosphorothioate
  modified_base 5: mod_base = OTHER; note = 2-fluororibose adenine
  modified_base 5..6: mod_base = OTHER; note = S-phosphorothioate
  modified_base 6: mod_base = OTHER; note = 2-fluororibose cytosine
  modified_base 6..7: mod_base = OTHER; note = S-phosphorothioate
  modified_base 7: mod_base = OTHER; note = 2-fluororibose uracil
  modified_base 7..8: mod_base = OTHER; note = S-phosphorothioate
  modified_base 8: mod_base = OTHER; note = 2-fluororibose guanine
  modified_base 8..9: mod_base = OTHER; note = S-phosphorothioate
  modified_base 9: mod_base = OTHER; note = 2-fluororibose uracil
  modified_base 9..10: mod_base = OTHER; note = S-phosphorothioate
  modified_base 10: mod_base = OTHER; note = 2-fluororibose guanine
  modified_base 10..11: mod_base = OTHER; note = S-phosphorothioate
  modified_base 11: mod_base = OTHER; note = 2-fluororibose guanine
  modified_base 11..12: mod_base = OTHER; note = S-phosphorothioate
  modified_base 12: mod_base = OTHER; note = 2-fluororibose cytosine
  modified_base 12..13: mod_base = OTHER; note = S-phosphorothioate
  modified_base 13: mod_base = OTHER; note = 2-fluororibose adenine
  modified_base 13..14: mod_base = OTHER; note = S-phosphorothioate
  modified_base 14: mod_base = OTHER; note = 2-fluororibose cytosine
  modified_base 14..15: mod_base = OTHER; note = S-phosphorothioate
  modified_base 15: mod_base = OTHER; note = 2-fluororibose cytosine
  modified_base 15..16: mod_base = OTHER; note = S-phosphorothioate
  modified_base 16: mod_base = OTHER; note = 2-fluororibose cytosine
  modified_base 16..17: mod_base = OTHER; note = S-phosphorothioate
  modified_base 17: mod_base = OTHER; note = 2-fluororibose adenine
  modified_base 17..18: mod_base = OTHER; note = S-phosphorothioate
  modified_base 18: mod_base = OTHER; note = 2-fluororibose guanine
  modified_base 18..19: mod_base = OTHER; note = S-phosphorothioate
  modified_base 19: mod_base = OTHER; note = 2-fluororibose adenine
  modified_base 19..20: mod_base = OTHER; note = S-phosphorothioate
  modified_base 20: mod_base = OTHER; note = 2-fluororibose uracil
  modified_base 20..21: mod_base = OTHER; note = S-phosphorothioate
  modified_base 21: mod_base = OTHER; note = 2-fluororibose uracil
  modified_base 21..22: mod_base = OTHER; note = S-phosphorothioate
  modified_base 22: mod_base = OTHER; note = 2-fluororibose adenine
  modified_base 22..23: mod_base = OTHER; note = S-phosphorothioate
  modified_base 23: mod_base = OTHER; note = 2-fluororibose uracil
  modified_base 23..24: mod_base = OTHER; note = S-phosphorothioate
  modified_base 24: mod_base = OTHER; note = 2-fluororibose cytosine
  modified_base 24..25: mod_base = OTHER; note = S-phosphorothioate
  modified_base 25: mod_base = OTHER; note = deoxyribose cytosine
  modified_base 25..26: mod_base = OTHER; note = S-phosphorothioate
  modified_base 26: mod_base = OTHER; note = deoxyribose adenine
  modified_base 26..27: mod_base = OTHER; note R-N-(1,3-dimethylimidazolidin-2-ylidene)phosphoramidate
  modified_base 27: mod_base = um
  modified_base 27..28: mod_base = OTHER; note = S-phosphorothioate
  modified_base 28: mod_base = OTHER; note = 2-fluororibose guanine
  modified_base 28..29: mod_base = OTHER; note = S-phosphorothioate
  modified_base 29: mod_base = um
  modified_base 29..30: mod_base = OTHER; note R-N-(1,3-dimethylimidazolidin-2-ylidene)phosphoramidate
  modified_base 30: mod_base = um
  source 1..30: mol_type = other RNA

SEQ ID NO: 654 - RNA, 30 nt, synthetic construct; identical to SEQ ID NO: 1
  misc_feature 1..30: note = Synthetic: WV-47043
  misc_feature 1..30: note = Synthetic: ADR-0102437
  modified_base 1: mod_base = OTHER; note = 2-fluororibose adenine
  modified_base 1..2: mod_base = OTHER; note R-N-(1,3-dimethylimidazolidin-2-ylidene)phosphoramidate
  modified_base 2: mod_base = OTHER; note = 2-fluororibose uracil
  modified_base 2..3: mod_base = OTHER; note = S-phosphorothioate
  modified_base 3: mod_base = OTHER; note = 2-fluororibose cytosine
  modified_base 3..4: mod_base = OTHER; note = S-phosphorothioate
  modified_base 4: mod_base = OTHER; note = 2-fluororibose cytosine
  modified_base 4..5: mod_base = OTHER; note = S-phosphorothioate
  modified_base 5: mod_base = OTHER; note = 2-fluororibose adenine
  modified_base 5..6: mod_base = OTHER; note = S-phosphorothioate
  modified_base 6: mod_base = OTHER; note = 2-fluororibose cytosine
  modified_base 6..7: mod_base = OTHER; note = S-phosphorothioate
  modified_base 7: mod_base = OTHER; note = 2-fluororibose uracil
  modified_base 7..8: mod_base = OTHER; note = S-phosphorothioate
  modified_base 8: mod_base = OTHER; note = 2-fluororibose guanine
  modified_base 8..9: mod_base = OTHER; note = S-phosphorothioate
  modified_base 9: mod_base = OTHER; note = 2-fluororibose uracil
  modified_base 9..10: mod_base = OTHER; note = S-phosphorothioate
  modified_base 10: mod_base = OTHER; note = 2-fluororibose guanine
  modified_base 10..11: mod_base = OTHER; note = S-phosphorothioate
  modified_base 11: mod_base = OTHER; note = 2-fluororibose guanine
  modified_base 11..12: mod_base = OTHER; note = S-phosphorothioate
  modified_base 12: mod_base = OTHER; note = 2-fluororibose cytosine
  modified_base 12..13: mod_base = OTHER; note = S-phosphorothioate
  modified_base 13: mod_base = OTHER; note = 2-fluororibose adenine
  modified_base 13..14: mod_base = OTHER; note = S-phosphorothioate
  modified_base 14: mod_base = OTHER; note = 2-fluororibose cytosine
  modified_base 14..15: mod_base = OTHER; note = S-phosphorothioate
  modified_base 15: mod_base = OTHER; note = 2-fluororibose cytosine
  modified_base 15..16: mod_base = OTHER; note = S-phosphorothioate
  modified_base 16: mod_base = cm
  modified_base 16..17: mod_base = OTHER; note = S-phosphorothioate
  modified_base 17: mod_base = OTHER; note = 2-O-methylribose adenine
  modified_base 17..18: mod_base = OTHER; note = S-phosphorothioate
  modified_base 18: mod_base = gm
  modified_base 18..19: mod_base = OTHER; note = S-phosphorothioate
  modified_base 19: mod_base = OTHER; note = 2-O-methylribose adenine
  modified_base 19..20: mod_base = OTHER; note = S-phosphorothioate
  modified_base 20: mod_base = um
  modified_base 20..21: mod_base = OTHER; note = S-phosphorothioate
  modified_base 21: mod_base = um
  modified_base 21..22: mod_base = OTHER; note = S-phosphorothioate
  modified_base 22: mod_base = OTHER; note = 2-O-methylribose adenine
  modified_base 22..23: mod_base = OTHER; note = S-phosphorothioate
  modified_base 23: mod_base = um
  modified_base 23..24: mod_base = OTHER; note = S-phosphorothioate
  modified_base 24: mod_base = OTHER; note = 2-fluororibose cytosine
  modified_base 24..25: mod_base = OTHER; note = S-phosphorothioate
  modified_base 25: mod_base = OTHER; note = deoxyribose cytosine
  modified_base 25..26: mod_base = OTHER; note = S-phosphorothioate
  modified_base 26: mod_base = OTHER; note = deoxyribose adenine
  modified_base 26..27: mod_base = OTHER; note R-N-(1,3-dimethylimidazolidin-2-ylidene)phosphoramidate
  modified_base 27: mod_base = um
  modified_base 27..28: mod_base = OTHER; note = S-phosphorothioate
  modified_base 28: mod_base = gm
  modified_base 28..29: mod_base = OTHER; note = S-phosphorothioate
  modified_base 29: mod_base = um
  modified_base 29..30: mod_base = OTHER; note R-N-(1,3-dimethylimidazolidin-2-ylidene)phosphoramidate
  modified_base 30: mod_base = um
  source 1..30: mol_type = other RNA

SEQ ID NO: 655 - RNA, 30 nt, synthetic construct; identical to SEQ ID NO: 1
  misc_feature 1..30: note = Synthetic: WV-47045
  misc_feature 1..30: note = Synthetic: ADR-0102486
  modified_base 1: mod_base = OTHER; note = 2-O-methylribose adenine
  modified_base 1..2: mod_base = OTHER; note R-N-(1,3-dimethylimidazolidin-2-ylidene)phosphoramidate
  modified_base 2: mod_base = um
  modified_base 2..3: mod_base = OTHER; note = S-phosphorothioate
  modified_base 3: mod_base = cm
  modified_base 3..4: mod_base = OTHER; note = S-phosphorothioate
  modified_base 4: mod_base = OTHER; note = 2-fluororibose cytosine
  modified_base 4..5: mod_base = OTHER; note = S-phosphorothioate
  modified_base 5: mod_base = OTHER; note = 2-fluororibose adenine
  modified_base 5..6: mod_base = OTHER; note = S-phosphorothioate
  modified_base 6: mod_base = OTHER; note = 2-fluororibose cytosine
  modified_base 6..7: mod_base = OTHER; note = S-phosphorothioate
  modified_base 7: mod_base = OTHER; note = 2-fluororibose uracil
  modified_base 7..8: mod_base = OTHER; note = S-phosphorothioate
  modified_base 8: mod_base = OTHER; note = 2-fluororibose guanine
  modified_base 8..9: mod_base = OTHER; note = S-phosphorothioate
  modified_base 9: mod_base = OTHER; note = 2-fluororibose uracil
  modified_base 9..10: mod_base = OTHER; note = S-phosphorothioate
  modified_base 10: mod_base = OTHER; note = 2-fluororibose guanine
  modified_base 10..11: mod_base = OTHER; note = S-phosphorothioate
  modified_base 11: mod_base = OTHER; note = 2-fluororibose guanine
  modified_base 11..12: mod_base = OTHER; note = S-phosphorothioate
  modified_base 12: mod_base = OTHER; note = 2-fluororibose cytosine
  modified_base 12..13: mod_base = OTHER; note = S-phosphorothioate
  modified_base 13: mod_base = OTHER; note = 2-fluororibose adenine
  modified_base 13..14: mod_base = OTHER; note = S-phosphorothioate
  modified_base 14: mod_base = OTHER; note = 2-fluororibose cytosine
  modified_base 14..15: mod_base = OTHER; note = S-phosphorothioate
  modified_base 15: mod_base = OTHER; note = 2-fluororibose cytosine
  modified_base 15..16: mod_base = OTHER; note = S-phosphorothioate
  modified_base 16: mod_base = OTHER; note = 2-fluororibose cytosine
  modified_base 16..17: mod_base = OTHER; note = S-phosphorothioate
  modified_base 17: mod_base = OTHER; note = 2-fluororibose adenine
  modified_base 17..18: mod_base = OTHER; note = S-phosphorothioate
  modified_base 18: mod_base = OTHER; note = 2-fluororibose guanine
  modified_base 18..19: mod_base = OTHER; note = S-phosphorothioate
  modified_base 19: mod_base = OTHER; note = 2-fluororibose adenine
  modified_base 19..20: mod_base = OTHER; note = S-phosphorothioate
  modified_base 20: mod_base = OTHER; note = 2-fluororibose uracil
  modified_base 20..21: mod_base = OTHER; note = S-phosphorothioate
  modified_base 21: mod_base = OTHER; note = 2-fluororibose uracil
  modified_base 21..22: mod_base = OTHER; note = S-phosphorothioate
  modified_base 22: mod_base = OTHER; note = 2-fluororibose adenine
  modified_base 22..23: mod_base = OTHER; note = S-phosphorothioate
  modified_base 23: mod_base = OTHER; note = 2-fluororibose uracil
  modified_base 23..24: mod_base = OTHER; note = S-phosphorothioate
  modified_base 24: mod_base = OTHER; note = 2-fluororibose cytosine
  modified_base 24..25: mod_base = OTHER; note = S-phosphorothioate
  modified_base 25: mod_base = OTHER; note = deoxyribose cytosine
  modified_base 25..26: mod_base = OTHER; note = S-phosphorothioate
  modified_base 26: mod_base = OTHER; note = deoxyribose adenine
  modified_base 26..27: mod_base = OTHER; note R-N-(1,3-dimethylimidazolidin-2-ylidene)phosphoramidate
  modified_base 27: mod_base = um
  modified_base 27..28: mod_base = OTHER; note = S-phosphorothioate
  modified_base 28: mod_base = gm
  modified_base 28..29: mod_base = OTHER; note = S-phosphorothioate
  modified_base 29: mod_base = um
  modified_base 29..30: mod_base = OTHER; note R-N-(1,3-dimethylimidazolidin-2-ylidene)phosphoramidate
  modified_base 30: mod_base = um
  source 1..30: mol_type = other RNA

SEQ ID NO: 656 - RNA, 30 nt, synthetic construct; identical to SEQ ID NO: 1
  misc_feature 1..30: note = Synthetic: WV-47047
  misc_feature 1..30: note = Synthetic: ADR-0102487
  modified_base 1: mod_base = OTHER; note = 2-O-methylribose adenine
  modified_base 1..2: mod_base = OTHER; note R-N-(1,3-dimethylimidazolidin-2-ylidene)phosphoramidate
  modified_base 2: mod_base = um
  modified_base 2..3: mod_base = OTHER; note = S-phosphorothioate
  modified_base 3: mod_base = cm
  modified_base 3..4: mod_base = OTHER; note = S-phosphorothioate
  modified_base 4: mod_base = OTHER; note = 2-fluororibose cytosine
  modified_base 4..5: mod_base = OTHER; note = S-phosphorothioate
  modified_base 5: mod_base = OTHER; note = 2-fluororibose adenine
  modified_base 5..6: mod_base = OTHER; note = S-phosphorothioate
  modified_base 6: mod_base = OTHER; note = 2-fluororibose cytosine
  modified_base 6..7: mod_base = OTHER; note = S-phosphorothioate
  modified_base 7: mod_base = OTHER; note = 2-fluororibose uracil
  modified_base 8: mod_base = gm
  modified_base 8..9: mod_base = OTHER; note = S-phosphorothioate
  modified_base 9: mod_base = OTHER; note = 2-fluororibose uracil
  modified_base 9..10: mod_base = OTHER; note = S-phosphorothioate
  modified_base 10: mod_base = OTHER; note = 2-fluororibose guanine
  modified_base 11: mod_base = gm
  modified_base 11..12: mod_base = OTHER; note = S-phosphorothioate
  modified_base 12: mod_base = OTHER; note = 2-fluororibose cytosine
  modified_base 12..13: mod_base = OTHER; note R-N-(1,3-dimethylimidazolidin-2-ylidene)phosphoramidate
  modified_base 13: mod_base = OTHER; note = 2-O-methylribose adenine
  modified_base 14: mod_base = OTHER; note = 2-fluororibose cytosine
  modified_base 14..15: mod_base = OTHER; note = S-phosphorothioate
  modified_base 15: mod_base = OTHER; note = 2-fluororibose cytosine
  modified_base 15..16: mod_base = OTHER; note R-N-(1,3-dimethylimidazolidin-2-ylidene)phosphoramidate
  modified_base 16: mod_base = OTHER; note = 2-fluororibose cytosine
  modified_base 17: mod_base = OTHER; note = 2-O-methylribose adenine
  modified_base 17..18: mod_base = OTHER; note = S-phosphorothioate
  modified_base 18: mod_base = OTHER; note = 2-fluororibose guanine
  modified_base 18..19: mod_base = OTHER; note = S-phosphorothioate
  modified_base 19: mod_base = OTHER; note = 2-fluororibose adenine
  modified_base 19..20: mod_base = OTHER; note = S-phosphorothioate
  modified_base 20: mod_base = OTHER; note = 2-fluororibose uracil
  modified_base 20..21: mod_base = OTHER; note R-N-(1,3-dimethylimidazolidin-2-ylidene)phosphoramidate
  modified_base 21: mod_base = OTHER; note = 2-fluororibose uracil
  modified_base 21..22: mod_base = OTHER; note = S-phosphorothioate
  modified_base 22: mod_base = OTHER; note = 2-O-methylribose adenine
  modified_base 23: mod_base = OTHER; note = 2-fluororibose uracil
  modified_base 23..24: mod_base = OTHER; note = S-phosphorothioate
  modified_base 24: mod_base = OTHER; note = 2-fluororibose cytosine
  modified_base 24..25: mod_base = OTHER; note = S-phosphorothioate
  modified_base 25: mod_base = OTHER; note = deoxyribose cytosine
  modified_base 25..26: mod_base = OTHER; note = S-phosphorothioate
  modified_base 26: mod_base = OTHER; note = deoxyribose adenine
  modified_base 26..27: mod_base = OTHER; note R-N-(1,3-dimethylimidazolidin-2-ylidene)phosphoramidate
  modified_base 27: mod_base = um
  modified_base 28: mod_base = OTHER; note = 2-fluororibose guanine
  modified_base 28..29: mod_base = OTHER; note = S-phosphorothioate
  modified_base 29: mod_base = um
  modified_base 29..30: mod_base = OTHER; note R-N-(1,3-dimethylimidazolidin-2-ylidene)phosphoramidate
  modified_base 30: mod_base = um
  source 1..30: mol_type = other RNA

SEQ ID NO: 657 - RNA, 30 nt, synthetic construct; identical to SEQ ID NO: 1
  misc_feature 1..30: note = Synthetic: WV-47048
  misc_feature 1..30: note = Synthetic: ADR-0102549
  modified_base 1: mod_base = OTHER; note = 2-O-methylribose adenine
  modified_base 1..2: mod_base = OTHER; note R-N-(1,3-dimethylimidazolidin-2-ylidene)phosphoramidate
  modified_base 2: mod_base = um
  modified_base 2..3: mod_base = OTHER; note = S-phosphorothioate
  modified_base 3: mod_base = cm
  modified_base 3..4: mod_base = OTHER; note = S-phosphorothioate
  modified_base 4: mod_base = OTHER; note = 2-fluororibose cytosine
  modified_base 4..5: mod_base = OTHER; note = S-phosphorothioate
  modified_base 5: mod_base = OTHER; note = 2-fluororibose adenine
  modified_base 5..6: mod_base = OTHER; note = S-phosphorothioate
  modified_base 6: mod_base = cm
  modified_base 7: mod_base = OTHER; note = 2-fluororibose uracil
  modified_base 7..8: mod_base = OTHER; note = S-phosphorothioate
  modified_base 8: mod_base = OTHER; note = 2-fluororibose guanine
  modified_base 8..9: mod_base = OTHER; note = S-phosphorothioate
  modified_base 9: mod_base = OTHER; note = 2-fluororibose uracil
  modified_base 9..10: mod_base = OTHER; note = S-phosphorothioate
  modified_base 10: mod_base = OTHER; note = 2-fluororibose guanine
  modified_base 10..11: mod_base = OTHER; note = S-phosphorothioate
  modified_base 11: mod_base = OTHER; note = 2-fluororibose guanine
  modified_base 11..12: mod_base = OTHER; note R-N-(1,3-dimethylimidazolidin-2-ylidene)phosphoramidate
  modified_base 12: mod_base = OTHER; note = 2-fluororibose cytosine
  modified_base 12..13: mod_base = OTHER; note = S-phosphorothioate
  modified_base 13: mod_base = OTHER; note = 2-fluororibose adenine
  modified_base 14: mod_base = OTHER; note = 2-fluororibose cytosine
  modified_base 14..15: mod_base = OTHER; note R-N-(1,3-dimethylimidazolidin-2-ylidene)phosphoramidate
  modified_base 15: mod_base = OTHER; note = 2-fluororibose cytosine
  modified_base 15..16: mod_base = OTHER; note = S-phosphorothioate
  modified_base 16: mod_base = OTHER; note = 2-fluororibose cytosine
  modified_base 16..17: mod_base = OTHER; note = S-phosphorothioate
  modified_base 17: mod_base = OTHER; note = 2-fluororibose adenine
  modified_base 17..18: mod_base = OTHER; note = S-phosphorothioate
  modified_base 18: mod_base = OTHER; note = 2-fluororibose guanine
  modified_base 18..19: mod_base = OTHER; note = S-phosphorothioate
  modified_base 19: mod_base = OTHER; note = 2-fluororibose adenine
  modified_base 19..20: mod_base = OTHER; note = S-phosphorothioate
  modified_base 20: mod_base = um
  modified_base 21: mod_base = OTHER; note = 2-fluororibose uracil
  modified_base 21..22: mod_base = OTHER; note = S-phosphorothioate
  modified_base 22: mod_base = OTHER; note = 2-fluororibose adenine
  modified_base 22..23: mod_base = OTHER; note = S-phosphorothioate
  modified_base 23: mod_base = OTHER; note = 2-fluororibose uracil
  modified_base 23..24: mod_base = OTHER; note = S-phosphorothioate
  modified_base 24: mod_base = OTHER; note = 2-fluororibose cytosine
  modified_base 24..25: mod_base = OTHER; note = S-phosphorothioate
  modified_base 25: mod_base = OTHER; note = deoxyribose cytosine
  modified_base 25..26: mod_base = OTHER; note = S-phosphorothioate
  modified_base 26: mod_base = OTHER; note = deoxyribose adenine
  modified_base 26..27: mod_base = OTHER; note R-N-(1,3-dimethylimidazolidin-2-ylidene)phosphoramidate
  modified_base 27: mod_base = um
  modified_base 28: mod_base = OTHER; note = 2-fluororibose guanine
  modified_base 28..29: mod_base = OTHER; note = S-phosphorothioate
  modified_base 29: mod_base = um
  modified_base 29..30: mod_base = OTHER; note R-N-(1,3-dimethylimidazolidin-2-ylidene)phosphoramidate
  modified_base 30: mod_base = um
  source 1..30: mol_type = other RNA

SEQ ID NO: 658 - RNA, 30 nt, synthetic construct; identical to SEQ ID NO: 1
  misc_feature 1..30: note = Synthetic: WV-47050
  misc_feature 1..30: note = Synthetic: ADR-0102537
  modified_base 1: mod_base = OTHER; note = 2-O-methylribose adenine
  modified_base 1..2: mod_base = OTHER; note R-N-(1,3-dimethylimidazolidin-2-ylidene)phosphoramidate
  modified_base 2: mod_base = um
  modified_base 2..3: mod_base = OTHER; note = S-phosphorothioate
  modified_base 3: mod_base = cm
  modified_base 3..4: mod_base = OTHER; note = S-phosphorothioate
  modified_base 4: mod_base = OTHER; note = 2-fluororibose cytosine
  modified_base 4..5: mod_base = OTHER; note = S-phosphorothioate
  modified_base 5: mod_base = OTHER; note = 2-fluororibose adenine
  modified_base 5..6: mod_base = OTHER; note = S-phosphorothioate
  modified_base 6: mod_base = OTHER; note = 2-fluororibose cytosine
  modified_base 6..7: mod_base = OTHER; note = S-phosphorothioate
  modified_base 7: mod_base = um
  modified_base 8: mod_base = gm
  modified_base 8..9: mod_base = OTHER; note = S-phosphorothioate
  modified_base 9: mod_base = OTHER; note = 2-fluororibose uracil
  modified_base 9..10: mod_base = OTHER; note = S-phosphorothioate
  modified_base 10: mod_base = OTHER; note = 2-fluororibose guanine
  modified_base 11: mod_base = gm
  modified_base 11..12: mod_base = OTHER; note = S-phosphorothioate
  modified_base 12: mod_base = OTHER; note = 2-fluororibose cytosine
  modified_base 12..13: mod_base = OTHER; note R-N-(1,3-dimethylimidazolidin-2-ylidene)phosphoramidate
  modified_base 13: mod_base = OTHER; note = 2-O-methylribose adenine
  modified_base 14: mod_base = OTHER; note = 2-fluororibose cytosine
  modified_base 14..15: mod_base = OTHER; note = S-phosphorothioate
  modified_base 15: mod_base = OTHER; note = 2-fluororibose cytosine
  modified_base 15..16: mod_base = OTHER; note R-N-(1,3-dimethylimidazolidin-2-ylidene)phosphoramidate
  modified_base 16: mod_base = OTHER; note = 2-fluororibose cytosine
  modified_base 17: mod_base = OTHER; note = 2-O-methylribose adenine
  modified_base 17..18: mod_base = OTHER; note = S-phosphorothioate
  modified_base 18: mod_base = OTHER; note = 2-fluororibose guanine
  modified_base 18..19: mod_base = OTHER; note = S-phosphorothioate
  modified_base 19: mod_base = OTHER; note = 2-fluororibose adenine
  modified_base 19..20: mod_base = OTHER; note = S-phosphorothioate
  modified_base 20: mod_base = OTHER; note = 2-fluororibose uracil
  modified_base 20..21: mod_base = OTHER; note = S-phosphorothioate
  modified_base 21: mod_base = um
  modified_base 22: mod_base = OTHER; note = 2-O-methylribose adenine
  modified_base 23: mod_base = OTHER; note = 2-fluororibose uracil
  modified_base 23..24: mod_base = OTHER; note = S-phosphorothioate
  modified_base 24: mod_base = OTHER; note = deoxyribose cytosine
  modified_base 24..25: mod_base = OTHER; note = S-phosphorothioate
  modified_base 25: mod_base = OTHER; note = deoxyribose cytosine
  modified_base 25..26: mod_base = OTHER; note = S-phosphorothioate
  modified_base 26: mod_base = OTHER; note = deoxyribose adenine
  modified_base 26..27: mod_base = OTHER; note R-N-(1,3-dimethylimidazolidin-2-ylidene)phosphoramidate
  modified_base 27: mod_base = um
  modified_base 28: mod_base = OTHER; note = 2-fluororibose guanine
  modified_base 28..29: mod_base = OTHER; note = S-phosphorothioate
  modified_base 29: mod_base = um
  modified_base 29..30: mod_base = OTHER; note R-N-(1,3-dimethylimidazolidin-2-ylidene)phosphoramidate
  modified_base 30: mod_base = um
  source 1..30: mol_type = other RNA

SEQ ID NO: 659 - RNA, 30 nt, synthetic construct; identical to SEQ ID NO: 1
  misc_feature 1..30: note = Synthetic: WV-47051
  misc_feature 1..30: note = Synthetic: ADR-0102544
  modified_base 1: mod_base = OTHER; note = 2-O-methylribose adenine
  modified_base 1..2: mod_base = OTHER; note R-N-(1,3-dimethylimidazolidin-2-ylidene)phosphoramidate
  modified_base 2: mod_base = um
  modified_base 2..3: mod_base = OTHER; note = S-phosphorothioate
  modified_base 3: mod_base = cm
  modified_base 3..4: mod_base = OTHER; note = S-phosphorothioate
  modified_base 4: mod_base = OTHER; note = 2-fluororibose cytosine
  modified_base 4..5: mod_base = OTHER; note = S-phosphorothioate
  modified_base 5: mod_base = OTHER; note = 2-fluororibose adenine
  modified_base 5..6: mod_base = OTHER; note = S-phosphorothioate
  modified_base 6: mod_base = OTHER; note = 2-fluororibose cytosine
  modified_base 6..7: mod_base = OTHER; note = S-phosphorothioate
  modified_base 7: mod_base = um
  modified_base 8: mod_base = gm
  modified_base 9: mod_base = OTHER; note = 2-fluororibose uracil
  modified_base 9..10: mod_base = OTHER; note = S-phosphorothioate
  modified_base 10: mod_base = OTHER; note = 2-fluororibose guanine
  modified_base 10..11: mod_base = OTHER; note = S-phosphorothioate
  modified_base 11: mod_base = gm
  modified_base 12: mod_base = OTHER; note = 2-fluororibose cytosine
  modified_base 12..13: mod_base = OTHER; note R-N-(1,3-dimethylimidazolidin-2-ylidene)phosphoramidate
  modified_base 13: mod_base = OTHER; note = 2-O-methylribose adenine
  modified_base 14: mod_base = OTHER; note = 2-fluororibose cytosine
  modified_base 14..15: mod_base = OTHER; note = S-phosphorothioate
  modified_base 15: mod_base = OTHER; note = 2-fluororibose cytosine
  modified_base 15..16: mod_base = OTHER; note R-N-(1,3-dimethylimidazolidin-2-ylidene)phosphoramidate
  modified_base 16: mod_base = OTHER; note = 2-fluororibose cytosine
  modified_base 17: mod_base = OTHER; note = 2-O-methylribose adenine
  modified_base 17..18: mod_base = OTHER; note = S-phosphorothioate
  modified_base 18: mod_base = OTHER; note = 2-fluororibose guanine
  modified_base 18..19: mod_base = OTHER; note = S-phosphorothioate
  modified_base 19: mod_base = OTHER; note = 2-fluororibose adenine
  modified_base 19..20: mod_base = OTHER; note = S-phosphorothioate
  modified_base 20: mod_base = OTHER; note = 2-fluororibose uracil
  modified_base 20..21: mod_base = OTHER; note R-N-(1,3-dimethylimidazolidin-2-ylidene)phosphoramidate
  modified_base 21: mod_base = um
  modified_base 22: mod_base = OTHER; note = 2-O-methylribose adenine
  modified_base 23: mod_base = OTHER; note = 2-fluororibose uracil
  modified_base 23..24: mod_base = OTHER; note = S-phosphorothioate
  modified_base 24: mod_base = OTHER; note = deoxyribose cytosine
  modified_base 24..25: mod_base = OTHER; note = S-phosphorothioate
  modified_base 25: mod_base = OTHER; note = deoxyribose cytosine
  modified_base 25..26: mod_base = OTHER; note = S-phosphorothioate
  modified_base 26: mod_base = OTHER; note = deoxyribose adenine
  modified_base 26..27: mod_base = OTHER; note R-N-(1,3-dimethylimidazolidin-2-ylidene)phosphoramidate
  modified_base 27: mod_base = um
  modified_base 28: mod_base = OTHER; note = 2-fluororibose guanine
  modified_base 28..29: mod_base = OTHER; note = S-phosphorothioate
  modified_base 29: mod_base = um
  modified_base 29..30: mod_base = OTHER; note R-N-(1,3-dimethylimidazolidin-2-ylidene)phosphoramidate
  modified_base 30: mod_base = um
  source 1..30: mol_type = other RNA

SEQ ID NO: 660 - RNA, 30 nt, synthetic construct; identical to SEQ ID NO: 1
  misc_feature 1..30: note = Synthetic: WV-47052
  misc_feature 1..30: note = Synthetic: ADR-0102550
  modified_base 1: mod_base = OTHER; note = 2-O-methylribose adenine
  modified_base 1..2: mod_base = OTHER; note R-N-(1,3-dimethylimidazolidin-2-ylidene)phosphoramidate
  modified_base 2: mod_base = um
  modified_base 2..3: mod_base = OTHER; note = S-phosphorothioate
  modified_base 3: mod_base = cm
  modified_base 3..4: mod_base = OTHER; note = S-phosphorothioate
  modified_base 4: mod_base = OTHER; note = 2-fluororibose cytosine
  modified_base 4..5: mod_base = OTHER; note = S-phosphorothioate
  modified_base 5: mod_base = OTHER; note = 2-fluororibose adenine
  modified_base 5..6: mod_base = OTHER; note = S-phosphorothioate
  modified_base 6: mod_base = cm
  modified_base 7: mod_base = um
  modified_base 7..8: mod_base = OTHER; note = S-phosphorothioate
  modified_base 8: mod_base = OTHER; note = 2-fluororibose guanine
  modified_base 8..9: mod_base = OTHER; note = S-phosphorothioate
  modified_base 9: mod_base = OTHER; note = 2-fluororibose uracil
  modified_base 10: mod_base = gm
  modified_base 10..11: mod_base = OTHER; note = S-phosphorothioate
  modified_base 11: mod_base = OTHER; note = 2-fluororibose guanine
  modified_base 11..12: mod_base = OTHER; note R-N-(1,3-dimethylimidazolidin-2-ylidene)phosphoramidate
  modified_base 12: mod_base = cm
  modified_base 13: mod_base = OTHER; note = 2-fluororibose adenine
  modified_base 13..14: mod_base = OTHER; note = S-phosphorothioate
  modified_base 14: mod_base = OTHER; note = 2-fluororibose cytosine
  modified_base 14..15: mod_base = OTHER; note R-N-(1,3-dimethylimidazolidin-2-ylidene)phosphoramidate
  modified_base 15: mod_base = OTHER; note = 2-fluororibose cytosine
  modified_base 16: mod_base = cm
  modified_base 16..17: mod_base = OTHER; note = S-phosphorothioate
  modified_base 17: mod_base = OTHER; note = 2-fluororibose adenine
  modified_base 17..18: mod_base = OTHER; note = S-phosphorothioate
  modified_base 18: mod_base = OTHER; note = 2-fluororibose guanine
  modified_base 18..19: mod_base = OTHER; note = S-phosphorothioate
  modified_base 19: mod_base = OTHER; note = 2-fluororibose adenine
  modified_base 19..20: mod_base = OTHER; note = S-phosphorothioate
  modified_base 20: mod_base = um
  modified_base 21: mod_base = um
  modified_base 22: mod_base = OTHER; note = 2-fluororibose adenine
  modified_base 22..23: mod_base = OTHER; note = S-phosphorothioate
  modified_base 23: mod_base = OTHER; note = 2-fluororibose uracil
  modified_base 23..24: mod_base = OTHER; note = S-phosphorothioate
  modified_base 24: mod_base = OTHER; note = deoxyribose cytosine
  modified_base 24..25: mod_base = OTHER; note = S-phosphorothioate
  modified_base 25: mod_base = OTHER; note = deoxyribose cytosine
  modified_base 25..26: mod_base = OTHER; note = S-phosphorothioate
  modified_base 26: mod_base = OTHER; note = deoxyribose adenine
  modified_base 26..27: mod_base = OTHER; note R-N-(1,3-dimethylimidazolidin-2-ylidene)phosphoramidate
  modified_base 27: mod_base = um
  modified_base 28: mod_base = OTHER; note = 2-fluororibose guanine
  modified_base 28..29: mod_base = OTHER; note = S-phosphorothioate
  modified_base 29: mod_base = um
  modified_base 29..30: mod_base = OTHER; note R-N-(1,3-dimethylimidazolidin-2-ylidene)phosphoramidate
  modified_base 30: mod_base = um
  source 1..30: mol_type = other RNA

SEQ ID NO: 661 - RNA, 30 nt, synthetic construct
  misc_feature 1..30: note = Synthetic: WV-44560
  misc_feature 1..30: note = Synthetic: ADR-0102481
  modified_base 1: mod_base = OTHER; note = 2-fluororibose uracil
  modified_base 1..2: mod_base = OTHER; note R-N-(1,3-dimethylimidazolidin-2-ylidene)phosphoramidate
  modified_base 2: mod_base = OTHER; note = 2-fluororibose cytosine
  modified_base 2..3: mod_base = OTHER; note = S-phosphorothioate
  modified_base 3: mod_base = OTHER; note = 2-fluororibose cytosine
  modified_base 3..4: mod_base = OTHER; note = S-phosphorothioate
  modified_base 4: mod_base = OTHER; note = 2-fluororibose adenine
  modified_base 4..5: mod_base = OTHER; note = S-phosphorothioate
  modified_base 5: mod_base = OTHER; note = 2-fluororibose cytosine
  modified_base 5..6: mod_base = OTHER; note = S-phosphorothioate
  modified_base 6: mod_base = OTHER; note = 2-fluororibose uracil
  modified_base 6..7: mod_base = OTHER; note = S-phosphorothioate
  modified_base 7: mod_base = OTHER; note = 2-fluororibose guanine
  modified_base 7..8: mod_base = OTHER; note = S-phosphorothioate
  modified_base 8: mod_base = OTHER; note = 2-fluororibose uracil
  modified_base 8..9: mod_base = OTHER; note = S-phosphorothioate
  modified_base 9: mod_base = OTHER; note = 2-fluororibose guanine
  modified_base 9..10: mod_base = OTHER; note = S-phosphorothioate
  modified_base 10: mod_base = OTHER; note = 2-fluororibose guanine
  modified_base 10..11: mod_base = OTHER; note = S-phosphorothioate
  modified_base 11: mod_base = OTHER; note = 2-fluororibose cytosine
  modified_base 11..12: mod_base = OTHER; note = S-phosphorothioate
  modified_base 12: mod_base = OTHER; note = 2-fluororibose adenine
  modified_base 12..13: mod_base = OTHER; note = S-phosphorothioate
  modified_base 13: mod_base = OTHER; note = 2-fluororibose cytosine
  modified_base 13..14: mod_base = OTHER; note = S-phosphorothioate
  modified_base 14: mod_base = OTHER; note = 2-fluororibose cytosine
  modified_base 14..15: mod_base = OTHER; note = S-phosphorothioate
  modified_base 15: mod_base = OTHER; note = 2-fluororibose cytosine
  modified_base 15..16: mod_base = OTHER; note = S-phosphorothioate
  modified_base 16: mod_base = OTHER; note = 2-O-methylribose adenine
  modified_base 16..17: mod_base = OTHER; note = S-phosphorothioate
  modified_base 17: mod_base = gm
  modified_base 17..18: mod_base = OTHER; note = S-phosphorothioate
  modified_base 18: mod_base = OTHER; note = 2-O-methylribose adenine
  modified_base 18..19: mod_base = OTHER; note = S-phosphorothioate
  modified_base 19: mod_base = um
  modified_base 19..20: mod_base = OTHER; note = S-phosphorothioate
  modified_base 20: mod_base = um
  modified_base 20..21: mod_base = OTHER; note = S-phosphorothioate
  modified_base 21: mod_base = OTHER; note = 2-O-methylribose adenine
  modified_base 21..22: mod_base = OTHER; note = S-phosphorothioate
  modified_base 22: mod_base = um
  modified_base 22..23: mod_base = OTHER; note = S-phosphorothioate
  modified_base 23: mod_base = OTHER; note = 2-fluororibose cytosine
  modified_base 23..24: mod_base = OTHER; note = S-phosphorothioate
  modified_base 24: mod_base = OTHER; note = deoxyribose cytosine
  modified_base 24..25: mod_base = OTHER; note = S-phosphorothioate
  modified_base 25: mod_base = OTHER; note = deoxyribose adenine
  modified_base 25..26: mod_base = OTHER; note R-N-(1,3-dimethylimidazolidin-2-ylidene)phosphoramidate
  modified_base 26: mod_base = um
  modified_base 26..27: mod_base = OTHER; note = S-phosphorothioate
  modified_base 27: mod_base = gm
  modified_base 27..28: mod_base = OTHER; note = S-phosphorothioate
  modified_base 28: mod_base = um
  modified_base 28..29: mod_base = OTHER; note = S-phosphorothioate
  modified_base 29: mod_base = um
  modified_base 29..30: mod_base = OTHER; note R-N-(1,3-dimethylimidazolidin-2-ylidene)phosphoramidate
  modified_base 30: mod_base = OTHER; note = 2-O-methylribose adenine
  source 1..30: mol_type = other RNA
tccactgtggcacccagattatccatgtta

SEQ ID NO: 662 - RNA, 30 nt, synthetic construct; identical to SEQ ID NO: 661
  misc_feature 1..30: note = Synthetic: WV-44561
  misc_feature 1..30: note = Synthetic: ADR-0102561
  modified_base 1: mod_base = um
  modified_base 1..2: mod_base = OTHER; note R-N-(1,3-dimethylimidazolidin-2-ylidene)phosphoramidate
  modified_base 2: mod_base = cm
  modified_base 2..3: mod_base = OTHER; note = S-phosphorothioate
  modified_base 3: mod_base = cm
  modified_base 3..4: mod_base = OTHER; note = S-phosphorothioate
  modified_base 4: mod_base = OTHER; note = 2-fluororibose adenine
  modified_base 4..5: mod_base = OTHER; note = S-phosphorothioate
  modified_base 5: mod_base = OTHER; note = 2-fluororibose cytosine
  modified_base 5..6: mod_base = OTHER; note = S-phosphorothioate
  modified_base 6: mod_base = OTHER; note = 2-fluororibose uracil
  modified_base 6..7: mod_base = OTHER; note = S-phosphorothioate
  modified_base 7: mod_base = OTHER; note = 2-fluororibose guanine
  modified_base 7..8: mod_base = OTHER; note = S-phosphorothioate
  modified_base 8: mod_base = OTHER; note = 2-fluororibose uracil
  modified_base 8..9: mod_base = OTHER; note = S-phosphorothioate
  modified_base 9: mod_base = OTHER; note = 2-fluororibose guanine
  modified_base 9..10: mod_base = OTHER; note = S-phosphorothioate
  modified_base 10: mod_base = OTHER; note = 2-fluororibose guanine
  modified_base 10..11: mod_base = OTHER; note = S-phosphorothioate
  modified_base 11: mod_base = OTHER; note = 2-fluororibose cytosine
  modified_base 11..12: mod_base = OTHER; note = S-phosphorothioate
  modified_base 12: mod_base = OTHER; note = 2-fluororibose adenine
  modified_base 12..13: mod_base = OTHER; note = S-phosphorothioate
  modified_base 13: mod_base = OTHER; note = 2-fluororibose cytosine
  modified_base 13..14: mod_base = OTHER; note = S-phosphorothioate
  modified_base 14: mod_base = OTHER; note = 2-fluororibose cytosine
  modified_base 14..15: mod_base = OTHER; note = S-phosphorothioate
  modified_base 15: mod_base = OTHER; note = 2-fluororibose cytosine
  modified_base 15..16: mod_base = OTHER; note = S-phosphorothioate
  modified_base 16: mod_base = OTHER; note = 2-fluororibose adenine
  modified_base 16..17: mod_base = OTHER; note = S-phosphorothioate
  modified_base 17: mod_base = OTHER; note = 2-fluororibose guanine
  modified_base 17..18: mod_base = OTHER; note = S-phosphorothioate
  modified_base 18: mod_base = OTHER; note = 2-fluororibose adenine
  modified_base 18..19: mod_base = OTHER; note = S-phosphorothioate
  modified_base 19: mod_base = OTHER; note = 2-fluororibose uracil
  modified_base 19..20: mod_base = OTHER; note = S-phosphorothioate
  modified_base 20: mod_base = OTHER; note = 2-fluororibose uracil
  modified_base 20..21: mod_base = OTHER; note = S-phosphorothioate
  modified_base 21: mod_base = OTHER; note = 2-fluororibose adenine
  modified_base 21..22: mod_base = OTHER; note = S-phosphorothioate
  modified_base 22: mod_base = OTHER; note = 2-fluororibose uracil
  modified_base 22..23: mod_base = OTHER; note = S-phosphorothioate
  modified_base 23: mod_base = OTHER; note = 2-fluororibose cytosine
  modified_base 23..24: mod_base = OTHER; note = S-phosphorothioate
  modified_base 24: mod_base = OTHER; note = deoxyribose cytosine
  modified_base 24..25: mod_base = OTHER; note = S-phosphorothioate
  modified_base 25: mod_base = OTHER; note = deoxyribose adenine
  modified_base 25..26: mod_base = OTHER; note R-N-(1,3-dimethylimidazolidin-2-ylidene)phosphoramidate
  modified_base 26: mod_base = um
  modified_base 26..27: mod_base = OTHER; note = S-phosphorothioate
  modified_base 27: mod_base = OTHER; note = 2-fluororibose guanine
  modified_base 27..28: mod_base = OTHER; note = S-phosphorothioate
  modified_base 28: mod_base = um
  modified_base 28..29: mod_base = OTHER; note = S-phosphorothioate
  modified_base 29: mod_base = um
  modified_base 29..30: mod_base = OTHER; note R-N-(1,3-dimethylimidazolidin-2-ylidene)phosphoramidate
  modified_base 30: mod_base = OTHER; note = 2-O-methylribose adenine
  source 1..30: mol_type = other RNA

SEQ ID NO: 663 - RNA, 30 nt, synthetic construct
  misc_feature 1..30: note = Synthetic: WV-44562
  misc_feature 1..30: note = Synthetic: ADR-0102562
  modified_base 1: mod_base = um
  modified_base 1..2: mod_base = OTHER; note R-N-(1,3-dimethylimidazolidin-2-ylidene)phosphoramidate
  modified_base 2: mod_base = cm
  modified_base 2..3: mod_base = OTHER; note = S-phosphorothioate
  modified_base 3: mod_base = cm
  modified_base 3..4: mod_base = OTHER; note = S-phosphorothioate
  modified_base 4: mod_base = OTHER; note = 2-fluororibose adenine
  modified_base 4..5: mod_base = OTHER; note = S-phosphorothioate
  modified_base 5: mod_base = OTHER; note = 2-fluororibose cytosine
  modified_base 5..6: mod_base = OTHER; note = S-phosphorothioate
  modified_base 6: mod_base = OTHER; note = 2-fluororibose uracil
  modified_base 6..7: mod_base = OTHER; note = S-phosphorothioate
  modified_base 7: mod_base = OTHER; note = 2-fluororibose guanine
  modified_base 7..8: mod_base = OTHER; note = S-phosphorothioate
  modified_base 8: mod_base = OTHER; note = 2-fluororibose uracil
  modified_base 8..9: mod_base = OTHER; note = S-phosphorothioate
  modified_base 9: mod_base = OTHER; note = 2-fluororibose guanine
  modified_base 9..10: mod_base = OTHER; note = S-phosphorothioate
  modified_base 10: mod_base = OTHER; note = 2-fluororibose guanine
  modified_base 10..11: mod_base = OTHER; note = S-phosphorothioate
  modified_base 11: mod_base = OTHER; note = 2-fluororibose cytosine
  modified_base 11..12: mod_base = OTHER; note = S-phosphorothioate
  modified_base 12: mod_base = OTHER; note = 2-fluororibose adenine
  modified_base 12..13: mod_base = OTHER; note = S-phosphorothioate
  modified_base 13: mod_base = OTHER; note = 2-fluororibose cytosine
  modified_base 13..14: mod_base = OTHER; note = S-phosphorothioate
  modified_base 14: mod_base = OTHER; note = 2-fluororibose cytosine
  modified_base 14..15: mod_base = OTHER; note = S-phosphorothioate
  modified_base 15: mod_base = OTHER; note = 2-fluororibose cytosine
  modified_base 15..16: mod_base = OTHER; note = S-phosphorothioate
  modified_base 16: mod_base = OTHER; note = 2-fluororibose adenine
  modified_base 16..17: mod_base = OTHER; note = S-phosphorothioate
  modified_base 17: mod_base = OTHER; note = 2-fluororibose guanine
  modified_base 17..18: mod_base = OTHER; note = S-phosphorothioate
  modified_base 18: mod_base = OTHER; note = 2-fluororibose adenine
  modified_base 18..19: mod_base = OTHER; note = S-phosphorothioate
  modified_base 19: mod_base = OTHER; note = 2-fluororibose uracil
  modified_base 19..20: mod_base = OTHER; note = S-phosphorothioate
  modified_base 20: mod_base = OTHER; note = 2-fluororibose uracil
  modified_base 20..21: mod_base = OTHER; note = S-phosphorothioate
  modified_base 21: mod_base = OTHER; note = 2-fluororibose adenine
  modified_base 21..22: mod_base = OTHER; note = S-phosphorothioate
  modified_base 22: mod_base = OTHER; note = 2-fluororibose uracil
  modified_base 22..23: mod_base = OTHER; note = S-phosphorothioate
  modified_base 23: mod_base = OTHER; note = 2-fluororibose cytosine
  modified_base 23..24: mod_base = OTHER; note = S-phosphorothioate
  modified_base 24: mod_base = OTHER; note = deoxyribose uracil (position 3 connectivity)
  modified_base 24..25: mod_base = OTHER; note = S-phosphorothioate
  modified_base 25: mod_base = OTHER; note = deoxyribose adenine
  modified_base 25..26: mod_base = OTHER; note R-N-(1,3-dimethylimidazolidin-2-ylidene)phosphoramidate
  modified_base 26: mod_base = um
  modified_base 26..27: mod_base = OTHER; note = S-phosphorothioate
  modified_base 27: mod_base = OTHER; note = 2-fluororibose guanine
  modified_base 27..28: mod_base = OTHER; note = S-phosphorothioate
  modified_base 28: mod_base = um
  modified_base 28..29: mod_base = OTHER; note = S-phosphorothioate
  modified_base 29: mod_base = um
  modified_base 29..30: mod_base = OTHER; note R-N-(1,3-dimethylimidazolidin-2-ylidene)phosphoramidate
  modified_base 30: mod_base = OTHER; note = 2-O-methylribose adenine
  source 1..30: mol_type = other RNA
tccactgtggcacccagattatctatgtta

SEQ ID NO: 664 - RNA, 30 nt, synthetic construct; identical to SEQ ID NO: 661
  misc_feature 1..30: note = Synthetic: WV-44563
  misc_feature 1..30: note = Synthetic: ADR-0102566
  modified_base 1: mod_base = um
  modified_base 1..2: mod_base = OTHER; note R-N-(1,3-dimethylimidazolidin-2-ylidene)phosphoramidate
  modified_base 2: mod_base = cm
  modified_base 2..3: mod_base = OTHER; note = S-phosphorothioate
  modified_base 3: mod_base = cm
  modified_base 3..4: mod_base = OTHER; note = S-phosphorothioate
  modified_base 4: mod_base = OTHER; note = 2-fluororibose adenine
  modified_base 4..5: mod_base = OTHER; note = S-phosphorothioate
  modified_base 5: mod_base = OTHER; note = 2-fluororibose cytosine
  modified_base 5..6: mod_base = OTHER; note = S-phosphorothioate
  modified_base 6: mod_base = um
  modified_base 7: mod_base = OTHER; note = 2-fluororibose guanine
  modified_base 7..8: mod_base = OTHER; note = S-phosphorothioate
  modified_base 8: mod_base = OTHER; note = 2-fluororibose uracil
  modified_base 8..9: mod_base = OTHER; note = S-phosphorothioate
  modified_base 9: mod_base = OTHER; note = 2-fluororibose guanine
  modified_base 9..10: mod_base = OTHER; note = S-phosphorothioate
  modified_base 10: mod_base = OTHER; note = 2-fluororibose guanine
  modified_base 10..11: mod_base = OTHER; note = S-phosphorothioate
  modified_base 11: mod_base = OTHER; note = 2-fluororibose cytosine
  modified_base 11..12: mod_base = OTHER; note R-N-(1,3-dimethylimidazolidin-2-ylidene)phosphoramidate
  modified_base 12: mod_base = OTHER; note = 2-fluororibose adenine
  modified_base 12..13: mod_base = OTHER; note = S-phosphorothioate
  modified_base 13: mod_base = OTHER; note = 2-fluororibose cytosine
  modified_base 14: mod_base = OTHER; note = 2-fluororibose cytosine
  modified_base 14..15: mod_base = OTHER; note R-N-(1,3-dimethylimidazolidin-2-ylidene)phosphoramidate
  modified_base 15: mod_base = OTHER; note = 2-fluororibose cytosine
  modified_base 15..16: mod_base = OTHER; note = S-phosphorothioate
  modified_base 16: mod_base = OTHER; note = 2-fluororibose adenine
  modified_base 16..17: mod_base = OTHER; note = S-phosphorothioate
  modified_base 17: mod_base = OTHER; note = 2-fluororibose guanine
  modified_base 17..18: mod_base = OTHER; note = S-phosphorothioate
  modified_base 18: mod_base = OTHER; note = 2-fluororibose adenine
  modified_base 18..19: mod_base = OTHER; note = S-phosphorothioate
  modified_base 19: mod_base = OTHER; note = 2-fluororibose uracil
  modified_base 19..20: mod_base = OTHER; note = S-phosphorothioate
  modified_base 20: mod_base = um
  modified_base 21: mod_base = OTHER; note = 2-fluororibose adenine
  modified_base 21..22: mod_base = OTHER; note = S-phosphorothioate
  modified_base 22: mod_base = OTHER; note = 2-fluororibose uracil
  modified_base 22..23: mod_base = OTHER; note = S-phosphorothioate
  modified_base 23: mod_base = OTHER; note = 2-fluororibose cytosine
  modified_base 23..24: mod_base = OTHER; note = S-phosphorothioate
  modified_base 24: mod_base = OTHER; note = deoxyribose cytosine
  modified_base 24..25: mod_base = OTHER; note = S-phosphorothioate
  modified_base 25: mod_base = OTHER; note = deoxyribose adenine
  modified_base 25..26: mod_base = OTHER; note R-N-(1,3-dimethylimidazolidin-2-ylidene)phosphoramidate
  modified_base 26: mod_base = um
  modified_base 27: mod_base = OTHER; note = 2-fluororibose guanine
  modified_base 27..28: mod_base = OTHER; note = S-phosphorothioate
  modified_base 28: mod_base = um
  modified_base 28..29: mod_base = OTHER; note = S-phosphorothioate
  modified_base 29: mod_base = um
  modified_base 29..30: mod_base = OTHER; note R-N-(1,3-dimethylimidazolidin-2-ylidene)phosphoramidate
  modified_base 30: mod_base = OTHER; note = 2-O-methylribose adenine
  source 1..30: mol_type = other RNA

SEQ ID NO: 665 - RNA, 30 nt, synthetic construct; identical to SEQ ID NO: 663
  misc_feature 1..30: note = Synthetic: WV-44564
  misc_feature 1..30: note = Synthetic: ADR-0102564
  modified_base 1: mod_base = um
  modified_base 1..2: mod_base = OTHER; note R-N-(1,3-dimethylimidazolidin-2-ylidene)phosphoramidate
  modified_base 2: mod_base = cm
  modified_base 2..3: mod_base = OTHER; note = S-phosphorothioate
  modified_base 3: mod_base = cm
  modified_base 3..4: mod_base = OTHER; note = S-phosphorothioate
  modified_base 4: mod_base = OTHER; note = 2-fluororibose adenine
  modified_base 4..5: mod_base = OTHER; note = S-phosphorothioate
  modified_base 5: mod_base = OTHER; note = 2-fluororibose cytosine
  modified_base 5..6: mod_base = OTHER; note = S-phosphorothioate
  modified_base 6: mod_base = OTHER; note = 2-fluororibose uracil
  modified_base 7: mod_base = gm
  modified_base 7..8: mod_base = OTHER; note = S-phosphorothioate
  modified_base 8: mod_base = OTHER; note = 2-fluororibose uracil
  modified_base 8..9: mod_base = OTHER; note = S-phosphorothioate
  modified_base 9: mod_base = OTHER; note = 2-fluororibose guanine
  modified_base 10: mod_base = gm
  modified_base 10..11: mod_base = OTHER; note = S-phosphorothioate
  modified_base 11: mod_base = OTHER; note = 2-fluororibose cytosine
  modified_base 11..12: mod_base = OTHER; note R-N-(1,3-dimethylimidazolidin-2-ylidene)phosphoramidate
  modified_base 12: mod_base = OTHER; note = 2-O-methylribose adenine
  modified_base 13: mod_base = OTHER; note = 2-fluororibose cytosine
  modified_base 13..14: mod_base = OTHER; note = S-phosphorothioate
  modified_base 14: mod_base = OTHER; note = 2-fluororibose cytosine
  modified_base 14..15: mod_base = OTHER; note R-N-(1,3-dimethylimidazolidin-2-ylidene)phosphoramidate
  modified_base 15: mod_base = OTHER; note = 2-fluororibose cytosine
  modified_base 16: mod_base = OTHER; note = 2-O-methylribose adenine
  modified_base 16..17: mod_base = OTHER; note = S-phosphorothioate
  modified_base 17: mod_base = OTHER; note = 2-fluororibose guanine
  modified_base 17..18: mod_base = OTHER; note = S-phosphorothioate
  modified_base 18: mod_base = OTHER; note = 2-fluororibose adenine
  modified_base 18..19: mod_base = OTHER; note = S-phosphorothioate
  modified_base 19: mod_base = OTHER; note = 2-fluororibose uracil
  modified_base 19..20: mod_base = OTHER; note R-N-(1,3-dimethylimidazolidin-2-ylidene)phosphoramidate
  modified_base 20: mod_base = OTHER; note = 2-fluororibose uracil
  modified_base 20..21: mod_base = OTHER; note = S-phosphorothioate
  modified_base 21: mod_base = OTHER; note = 2-O-methylribose adenine
  modified_base 22: mod_base = OTHER; note = 2-fluororibose uracil
  modified_base 22..23: mod_base = OTHER; note = S-phosphorothioate
  modified_base 23: mod_base = OTHER; note = 2-fluororibose cytosine
  modified_base 23..24: mod_base = OTHER; note = S-phosphorothioate
  modified_base 24: mod_base = OTHER; note = deoxyribose uracil (position 3 connectivity)
  modified_base 24..25: mod_base = OTHER; note = S-phosphorothioate
  modified_base 25: mod_base = OTHER; note = deoxyribose adenine
  modified_base 25..26: mod_base = OTHER; note R-N-(1,3-dimethylimidazolidin-2-ylidene)phosphoramidate
  modified_base 26: mod_base = um
  modified_base 27: mod_base = OTHER; note = 2-fluororibose guanine
  modified_base 27..28: mod_base = OTHER; note = S-phosphorothioate
  modified_base 28: mod_base = um
  modified_base 28..29: mod_base = OTHER; note = S-phosphorothioate
  modified_base 29: mod_base = um
  modified_base 29..30: mod_base = OTHER; note R-N-(1,3-dimethylimidazolidin-2-ylidene)phosphoramidate
  modified_base 30: mod_base = OTHER; note = 2-O-methylribose adenine
  source 1..30: mol_type = other RNA

SEQ ID NO: 666 - RNA, 30 nt, synthetic construct; identical to SEQ ID NO: 663
  misc_feature 1..30: note = Synthetic: WV-44565
  misc_feature 1..30: note = Synthetic: ADR-0102563
  modified_base 1: mod_base = um
  modified_base 1..2: mod_base = OTHER; note R-N-(1,3-dimethylimidazolidin-2-ylidene)phosphoramidate
  modified_base 2: mod_base = cm
  modified_base 2..3: mod_base = OTHER; note = S-phosphorothioate
  modified_base 3: mod_base = cm
  modified_base 3..4: mod_base = OTHER; note = S-phosphorothioate
  modified_base 4: mod_base = OTHER; note = 2-fluororibose adenine
  modified_base 4..5: mod_base = OTHER; note = S-phosphorothioate
  modified_base 5: mod_base = OTHER; note = 2-fluororibose cytosine
  modified_base 5..6: mod_base = OTHER; note = S-phosphorothioate
  modified_base 6: mod_base = OTHER; note = 2-fluororibose uracil
  modified_base 7: mod_base = gm
  modified_base 7..8: mod_base = OTHER; note = S-phosphorothioate
  modified_base 8: mod_base = OTHER; note = 2-fluororibose uracil
  modified_base 8..9: mod_base = OTHER; note = S-phosphorothioate
  modified_base 9: mod_base = OTHER; note = 2-fluororibose guanine
  modified_base 10: mod_base = gm
  modified_base 10..11: mod_base = OTHER; note = S-phosphorothioate
  modified_base 11: mod_base = OTHER; note = 2-fluororibose cytosine
  modified_base 11..12: mod_base = OTHER; note = S-phosphorothioate
  modified_base 12: mod_base = OTHER; note = 2-O-methylribose adenine
  modified_base 13: mod_base = OTHER; note = 2-fluororibose cytosine
  modified_base 13..14: mod_base = OTHER; note = S-phosphorothioate
  modified_base 14: mod_base = OTHER; note = 2-fluororibose cytosine
  modified_base 14..15: mod_base = OTHER; note = S-phosphorothioate
  modified_base 15: mod_base = OTHER; note = 2-fluororibose cytosine
  modified_base 15..16: mod_base = OTHER; note = S-phosphorothioate
  modified_base 16: mod_base = OTHER; note = 2-O-methylribose adenine
  modified_base 17: mod_base = OTHER; note = 2-fluororibose guanine
  modified_base 17..18: mod_base = OTHER; note = S-phosphorothioate
  modified_base 18: mod_base = OTHER; note = 2-fluororibose adenine
  modified_base 18..19: mod_base = OTHER; note = S-phosphorothioate
  modified_base 19: mod_base = OTHER; note = 2-fluororibose uracil
  modified_base 19..20: mod_base = OTHER; note = S-phosphorothioate
  modified_base 20: mod_base = OTHER; note = 2-fluororibose uracil
  modified_base 20..21: mod_base = OTHER; note = S-phosphorothioate
  modified_base 21: mod_base = OTHER; note = 2-O-methylribose adenine
  modified_base 22: mod_base = OTHER; note = 2-fluororibose uracil
  modified_base 22..23: mod_base = OTHER; note = S-phosphorothioate
  modified_base 23: mod_base = OTHER; note = 2-fluororibose cytosine
  modified_base 23..24: mod_base = OTHER; note = S-phosphorothioate
  modified_base 24: mod_base = OTHER; note = deoxyribose uracil (position 3 connectivity)
  modified_base 24..25: mod_base = OTHER; note = S-phosphorothioate
  modified_base 25: mod_base = OTHER; note = deoxyribose adenine
  modified_base 25..26: mod_base = OTHER; note R-N-(1,3-dimethylimidazolidin-2-ylidene)phosphoramidate
  modified_base 26: mod_base = um
  modified_base 27: mod_base = OTHER; note = 2-fluororibose guanine
  modified_base 27..28: mod_base = OTHER; note = S-phosphorothioate
  modified_base 28: mod_base = um
  modified_base 28..29: mod_base = OTHER; note = S-phosphorothioate
  modified_base 29: mod_base = um
  modified_base 29..30: mod_base = OTHER; note R-N-(1,3-dimethylimidazolidin-2-ylidene)phosphoramidate
  modified_base 30: mod_base = OTHER; note = 2-O-methylribose adenine
  source 1..30: mol_type = other RNA

SEQ ID NO: 667 - RNA, 30 nt, synthetic construct; identical to SEQ ID NO: 5
  misc_feature 1..30: note = Synthetic: WV-47054
  misc_feature 1..30: note = Synthetic: ADR-0102116
  modified_base 1: mod_base = OTHER; note = 2-fluororibose adenine
  modified_base 1..2: mod_base = OTHER; note R-N-(1,3-dimethylimidazolidin-2-ylidene)phosphoramidate
  modified_base 2: mod_base = OTHER; note = 2-fluororibose cytosine
  modified_base 2..3: mod_base = OTHER; note = S-phosphorothioate
  modified_base 3: mod_base = OTHER; note = 2-fluororibose adenine
  modified_base 3..4: mod_base = OTHER; note = S-phosphorothioate
  modified_base 4: mod_base = OTHER; note = 2-fluororibose uracil
  modified_base 4..5: mod_base = OTHER; note = S-phosphorothioate
  modified_base 5: mod_base = OTHER; note = 2-fluororibose adenine
  modified_base 5..6: mod_base = OTHER; note = S-phosphorothioate
  modified_base 6: mod_base = OTHER; note = 2-fluororibose adenine
  modified_base 6..7: mod_base = OTHER; note = S-phosphorothioate
  modified_base 7: mod_base = OTHER; note = 2-fluororibose uracil
  modified_base 7..8: mod_base = OTHER; note = S-phosphorothioate
  modified_base 8: mod_base = OTHER; note = 2-fluororibose uracil
  modified_base 8..9: mod_base = OTHER; note = S-phosphorothioate
  modified_base 9: mod_base = OTHER; note = 2-fluororibose uracil
  modified_base 9..10: mod_base = OTHER; note = S-phosphorothioate
  modified_base 10: mod_base = OTHER; note = 2-fluororibose adenine
  modified_base 10..11: mod_base = OTHER; note = S-phosphorothioate
  modified_base 11: mod_base = OTHER; note = 2-fluororibose cytosine
  modified_base 11..12: mod_base = OTHER; note = S-phosphorothioate
  modified_base 12: mod_base = OTHER; note = 2-fluororibose adenine
  modified_base 12..13: mod_base = OTHER; note = S-phosphorothioate
  modified_base 13: mod_base = OTHER; note = 2-fluororibose cytosine
  modified_base 13..14: mod_base = OTHER; note = S-phosphorothioate
  modified_base 14: mod_base = OTHER; note = 2-fluororibose guanine
  modified_base 14..15: mod_base = OTHER; note = S-phosphorothioate
  modified_base 15: mod_base = OTHER; note = 2-fluororibose adenine
  modified_base 15..16: mod_base = OTHER; note = S-phosphorothioate
  modified_base 16: mod_base = OTHER; note = 2-O-methylribose adenine
  modified_base 16..17: mod_base = OTHER; note = S-phosphorothioate
  modified_base 17: mod_base = OTHER; note = 2-O-methylribose adenine
  modified_base 17..18: mod_base = OTHER; note = S-phosphorothioate
  modified_base 18: mod_base = gm
  modified_base 18..19: mod_base = OTHER; note = S-phosphorothioate
  modified_base 19: mod_base = cm
  modified_base 19..20: mod_base = OTHER; note = S-phosphorothioate
  modified_base 20: mod_base = OTHER; note = 2-O-methylribose adenine
  modified_base 20..21: mod_base = OTHER; note = S-phosphorothioate
  modified_base 21: mod_base = OTHER; note = 2-O-methylribose adenine
  modified_base 21..22: mod_base = OTHER; note = S-phosphorothioate
  modified_base 22: mod_base = um
  modified_base 22..23: mod_base = OTHER; note = S-phosphorothioate
  modified_base 23: mod_base = gm
  modified_base 23..24: mod_base = OTHER; note = S-phosphorothioate
  modified_base 24: mod_base = OTHER; note = 2-fluororibose cytosine
  modified_base 24..25: mod_base = OTHER; note = S-phosphorothioate
  modified_base 25: mod_base = OTHER; note = deoxyribose cytosine
  modified_base 25..26: mod_base = OTHER; note = S-phosphorothioate
  modified_base 26: mod_base = OTHER; note = deoxyribose adenine
  modified_base 26..27: mod_base = OTHER; note R-N-(1,3-dimethylimidazolidin-2-ylidene)phosphoramidate
  modified_base 27: mod_base = um
  modified_base 27..28: mod_base = OTHER; note = S-phosphorothioate
  modified_base 28: mod_base = cm
  modified_base 28..29: mod_base = OTHER; note = S-phosphorothioate
  modified_base 29: mod_base = OTHER; note = 2-O-methylribose adenine
  modified_base 29..30: mod_base = OTHER; note R-N-(1,3-dimethylimidazolidin-2-ylidene)phosphoramidate
  modified_base 30: mod_base = cm
  source 1..30: mol_type = other RNA

SEQ ID NO: 668 - RNA, 30 nt, synthetic construct; identical to SEQ ID NO: 5
  misc_feature 1..30: note = Synthetic: WV-47055
  misc_feature 1..30: note = Synthetic: ADR-0102170
  modified_base 1: mod_base = OTHER; note = 2-O-methylribose adenine
  modified_base 1..2: mod_base = OTHER; note R-N-(1,3-dimethylimidazolidin-2-ylidene)phosphoramidate
  modified_base 2: mod_base = cm
  modified_base 2..3: mod_base = OTHER; note = S-phosphorothioate
  modified_base 3: mod_base = OTHER; note = 2-O-methylribose adenine
  modified_base 3..4: mod_base = OTHER; note = S-phosphorothioate
  modified_base 4: mod_base = OTHER; note = 2-fluororibose uracil
  modified_base 4..5: mod_base = OTHER; note = S-phosphorothioate
  modified_base 5: mod_base = OTHER; note = 2-fluororibose adenine
  modified_base 5..6: mod_base = OTHER; note = S-phosphorothioate
  modified_base 6: mod_base = OTHER; note = 2-fluororibose adenine
  modified_base 6..7: mod_base = OTHER; note = S-phosphorothioate
  modified_base 7: mod_base = OTHER; note = 2-fluororibose uracil
  modified_base 7..8: mod_base = OTHER; note = S-phosphorothioate
  modified_base 8: mod_base = OTHER; note = 2-fluororibose uracil
  modified_base 8..9: mod_base = OTHER; note = S-phosphorothioate
  modified_base 9: mod_base = OTHER; note = 2-fluororibose uracil
  modified_base 9..10: mod_base = OTHER; note = S-phosphorothioate
  modified_base 10: mod_base = OTHER; note = 2-fluororibose adenine
  modified_base 10..11: mod_base = OTHER; note = S-phosphorothioate
  modified_base 11: mod_base = OTHER; note = 2-fluororibose cytosine
  modified_base 11..12: mod_base = OTHER; note = S-phosphorothioate
  modified_base 12: mod_base = OTHER; note = 2-fluororibose adenine
  modified_base 12..13: mod_base = OTHER; note = S-phosphorothioate
  modified_base 13: mod_base = OTHER; note = 2-fluororibose cytosine
  modified_base 13..14: mod_base = OTHER; note = S-phosphorothioate
  modified_base 14: mod_base = OTHER; note = 2-fluororibose guanine
  modified_base 14..15: mod_base = OTHER; note = S-phosphorothioate
  modified_base 15: mod_base = OTHER; note = 2-fluororibose adenine
  modified_base 15..16: mod_base = OTHER; note = S-phosphorothioate
  modified_base 16: mod_base = OTHER; note = 2-fluororibose adenine
  modified_base 16..17: mod_base = OTHER; note = S-phosphorothioate
  modified_base 17: mod_base = OTHER; note = 2-fluororibose adenine
  modified_base 17..18: mod_base = OTHER; note = S-phosphorothioate
  modified_base 18: mod_base = OTHER; note = 2-fluororibose guanine
  modified_base 18..19: mod_base = OTHER; note = S-phosphorothioate
  modified_base 19: mod_base = OTHER; note = 2-fluororibose cytosine
  modified_base 19..20: mod_base = OTHER; note = S-phosphorothioate
  modified_base 20: mod_base = OTHER; note = 2-fluororibose adenine
  modified_base 20..21: mod_base = OTHER; note = S-phosphorothioate
  modified_base 21: mod_base = OTHER; note = 2-fluororibose adenine
  modified_base 21..22: mod_base = OTHER; note = S-phosphorothioate
  modified_base 22: mod_base = OTHER; note = 2-fluororibose uracil
  modified_base 22..23: mod_base = OTHER; note = S-phosphorothioate
  modified_base 23: mod_base = OTHER; note = 2-fluororibose guanine
  modified_base 23..24: mod_base = OTHER; note = S-phosphorothioate
  modified_base 24: mod_base = OTHER; note = 2-fluororibose cytosine
  modified_base 24..25: mod_base = OTHER; note = S-phosphorothioate
  modified_base 25: mod_base = OTHER; note = deoxyribose cytosine
  modified_base 25..26: mod_base = OTHER; note = S-phosphorothioate
  modified_base 26: mod_base = OTHER; note = deoxyribose adenine
  modified_base 26..27: mod_base = OTHER; note R-N-(1,3-dimethylimidazolidin-2-ylidene)phosphoramidate
  modified_base 27: mod_base = um
  modified_base 27..28: mod_base = OTHER; note = S-phosphorothioate
  modified_base 28: mod_base = OTHER; note = 2-fluororibose cytosine
  modified_base 28..29: mod_base = OTHER; note = S-phosphorothioate
  modified_base 29: mod_base = OTHER; note = 2-O-methylribose adenine
  modified_base 29..30: mod_base = OTHER; note R-N-(1,3-dimethylimidazolidin-2-ylidene)phosphoramidate
  modified_base 30: mod_base = cm
  source 1..30: mol_type = other RNA

SEQ ID NO: 669 - RNA, 30 nt, synthetic construct; identical to SEQ ID NO: 5
  misc_feature 1..30: note = Synthetic: WV-47056
  misc_feature 1..30: note = Synthetic: ADR-0102171
  modified_base 1: mod_base = OTHER; note = 2-O-methylribose adenine
  modified_base 1..2: mod_base = OTHER; note R-N-(1,3-dimethylimidazolidin-2-ylidene)phosphoramidate
  modified_base 2: mod_base = cm
  modified_base 2..3: mod_base = OTHER; note = S-phosphorothioate
  modified_base 3: mod_base = OTHER; note = 2-O-methylribose adenine
  modified_base 3..4: mod_base = OTHER; note = S-phosphorothioate
  modified_base 4: mod_base = OTHER; note = 2-fluororibose uracil
  modified_base 4..5: mod_base = OTHER; note = S-phosphorothioate
  modified_base 5: mod_base = OTHER; note = 2-fluororibose adenine
  modified_base 5..6: mod_base = OTHER; note = S-phosphorothioate
  modified_base 6: mod_base = OTHER; note = 2-fluororibose adenine
  modified_base 6..7: mod_base = OTHER; note = S-phosphorothioate
  modified_base 7: mod_base = OTHER; note = 2-fluororibose uracil
  modified_base 7..8: mod_base = OTHER; note = S-phosphorothioate
  modified_base 8: mod_base = OTHER; note = 2-fluororibose uracil
  modified_base 8..9: mod_base = OTHER; note = S-phosphorothioate
  modified_base 9: mod_base = OTHER; note = 2-fluororibose uracil
  modified_base 9..10: mod_base = OTHER; note = S-phosphorothioate
  modified_base 10: mod_base = OTHER; note = 2-fluororibose adenine
  modified_base 10..11: mod_base = OTHER; note = S-phosphorothioate
  modified_base 11: mod_base = OTHER; note = 2-fluororibose cytosine
  modified_base 11..12: mod_base = OTHER; note = S-phosphorothioate
  modified_base 12: mod_base = OTHER; note = 2-fluororibose adenine
  modified_base 12..13: mod_base = OTHER; note = S-phosphorothioate
  modified_base 13: mod_base = OTHER; note = 2-fluororibose cytosine
  modified_base 13..14: mod_base = OTHER; note = S-phosphorothioate
  modified_base 14: mod_base = OTHER; note = 2-fluororibose guanine
  modified_base 14..15: mod_base = OTHER; note = S-phosphorothioate
  modified_base 15: mod_base = OTHER; note = 2-fluororibose adenine
  modified_base 15..16: mod_base = OTHER; note = S-phosphorothioate
  modified_base 16: mod_base = OTHER; note = 2-fluororibose adenine
  modified_base 16..17: mod_base = OTHER; note = S-phosphorothioate
  modified_base 17: mod_base = OTHER; note = 2-fluororibose adenine
  modified_base 17..18: mod_base = OTHER; note = S-phosphorothioate
  modified_base 18: mod_base = OTHER; note = 2-fluororibose guanine
  modified_base 18..19: mod_base = OTHER; note = S-phosphorothioate
  modified_base 19: mod_base = OTHER; note = 2-fluororibose cytosine
  modified_base 19..20: mod_base = OTHER; note = S-phosphorothioate
  modified_base 20: mod_base = OTHER; note = 2-fluororibose adenine
  modified_base 20..21: mod_base = OTHER; note = S-phosphorothioate
  modified_base 21: mod_base = OTHER; note = 2-fluororibose adenine
  modified_base 21..22: mod_base = OTHER; note = S-phosphorothioate
  modified_base 22: mod_base = OTHER; note = 2-fluororibose uracil
  modified_base 22..23: mod_base = OTHER; note = S-phosphorothioate
  modified_base 23: mod_base = OTHER; note = 2-fluororibose guanine
  modified_base 23..24: mod_base = OTHER; note = S-phosphorothioate
  modified_base 24: mod_base = OTHER; note = 2-fluororibose cytosine
  modified_base 24..25: mod_base = OTHER; note = S-phosphorothioate
  modified_base 25: mod_base = OTHER; note = deoxyribose cytosine
  modified_base 25..26: mod_base = OTHER; note = S-phosphorothioate
  modified_base 26: mod_base = OTHER; note = deoxyribose adenine
  modified_base 26..27: mod_base = OTHER; note R-N-(1,3-dimethylimidazolidin-2-ylidene)phosphoramidate
  modified_base 27: mod_base = um
  modified_base 27..28: mod_base = OTHER; note = S-phosphorothioate
  modified_base 28: mod_base = cm
  modified_base 28..29: mod_base = OTHER; note = S-phosphorothioate
  modified_base 29: mod_base = OTHER; note = 2-O-methylribose adenine
  modified_base 29..30: mod_base = OTHER; note R-N-(1,3-dimethylimidazolidin-2-ylidene)phosphoramidate
  modified_base 30: mod_base = cm
  source 1..30: mol_type = other RNA

SEQ ID NO: 670 - RNA, 30 nt, synthetic construct; identical to SEQ ID NO: 5
  misc_feature 1..30: note = Synthetic: WV-47057
  misc_feature 1..30: note = Synthetic: ADR-0102179
  modified_base 1: mod_base = OTHER; note = 2-O-methylribose adenine
  modified_base 1..2: mod_base = OTHER; note R-N-(1,3-dimethylimidazolidin-2-ylidene)phosphoramidate
  modified_base 2: mod_base = cm
  modified_base 2..3: mod_base = OTHER; note = S-phosphorothioate
  modified_base 3: mod_base = OTHER; note = 2-O-methylribose adenine
  modified_base 3..4: mod_base = OTHER; note = S-phosphorothioate
  modified_base 4: mod_base = OTHER; note = 2-fluororibose uracil
  modified_base 4..5: mod_base = OTHER; note = S-phosphorothioate
  modified_base 5: mod_base = OTHER; note = 2-fluororibose adenine
  modified_base 5..6: mod_base = OTHER; note = S-phosphorothioate
  modified_base 6: mod_base = OTHER; note = 2-fluororibose adenine
  modified_base 6..7: mod_base = OTHER; note = S-phosphorothioate
  modified_base 7: mod_base = um
  modified_base 8: mod_base = OTHER; note = 2-fluororibose uracil
  modified_base 8..9: mod_base = OTHER; note = S-phosphorothioate
  modified_base 9: mod_base = OTHER; note = 2-fluororibose uracil
  modified_base 9..10: mod_base = OTHER; note = S-phosphorothioate
  modified_base 10: mod_base = OTHER; note = 2-fluororibose adenine
  modified_base 10..11: mod_base = OTHER; note = S-phosphorothioate
  modified_base 11: mod_base = OTHER; note = 2-fluororibose cytosine
  modified_base 11..12: mod_base = OTHER; note = S-phosphorothioate
  modified_base 12: mod_base = OTHER; note = 2-fluororibose adenine
  modified_base 12..13: mod_base = OTHER; note R-N-(1,3-dimethylimidazolidin-2-ylidene)phosphoramidate
  modified_base 13: mod_base = OTHER; note = 2-fluororibose cytosine
  modified_base 13..14: mod_base = OTHER; note = S-phosphorothioate
  modified_base 14: mod_base = OTHER; note = 2-fluororibose guanine
  modified_base 15: mod_base = OTHER; note = 2-fluororibose adenine
  modified_base 15..16: mod_base = OTHER; note R-N-(1,3-dimethylimidazolidin-2-ylidene)phosphoramidate
  modified_base 16: mod_base = OTHER; note = 2-fluororibose adenine
  modified_base 16..17: mod_base = OTHER; note = S-phosphorothioate
  modified_base 17: mod_base = OTHER; note = 2-fluororibose adenine
  modified_base 17..18: mod_base = OTHER; note = S-phosphorothioate
  modified_base 18: mod_base = OTHER; note = 2-fluororibose guanine
  modified_base 18..19: mod_base = OTHER; note = S-phosphorothioate
  modified_base 19: mod_base = OTHER; note = 2-fluororibose cytosine
  modified_base 19..20: mod_base = OTHER; note = S-phosphorothioate
  modified_base 20: mod_base = OTHER; note = 2-fluororibose adenine
  modified_base 20..21: mod_base = OTHER; note = S-phosphorothioate
  modified_base 21: mod_base = OTHER; note = 2-O-methylribose adenine
  modified_base 22: mod_base = OTHER; note = 2-fluororibose uracil
  modified_base 22..23: mod_base = OTHER; note = S-phosphorothioate
  modified_base 23: mod_base = OTHER; note = 2-fluororibose guanine
  modified_base 23..24: mod_base = OTHER; note = S-phosphorothioate
  modified_base 24: mod_base = OTHER; note = 2-fluororibose cytosine
  modified_base 24..25: mod_base = OTHER; note = S-phosphorothioate
  modified_base 25: mod_base = OTHER; note = deoxyribose cytosine
  modified_base 25..26: mod_base = OTHER; note = S-phosphorothioate
  modified_base 26: mod_base = OTHER; note = deoxyribose adenine
  modified_base 26..27: mod_base = OTHER; note R-N-(1,3-dimethylimidazolidin-2-ylidene)phosphoramidate
  modified_base 27: mod_base = um
  modified_base 28: mod_base = OTHER; note = 2-fluororibose cytosine
  modified_base 28..29: mod_base = OTHER; note = S-phosphorothioate
  modified_base 29: mod_base = OTHER; note = 2-O-methylribose adenine
  modified_base 29..30: mod_base = OTHER; note R-N-(1,3-dimethylimidazolidin-2-ylidene)phosphoramidate
  modified_base 30: mod_base = cm
  source 1..30: mol_type = other RNA

SEQ ID NO: 671 - RNA, 30 nt, synthetic construct; identical to SEQ ID NO: 5
  misc_feature 1..30: note = Synthetic: WV-47058
  misc_feature 1..30: note = Synthetic: ADR-0102178
  modified_base 1: mod_base = OTHER; note = 2-O-methylribose adenine
  modified_base 1..2: mod_base = OTHER; note R-N-(1,3-dimethylimidazolidin-2-ylidene)phosphoramidate
  modified_base 2: mod_base = cm
  modified_base 2..3: mod_base = OTHER; note = S-phosphorothioate
  modified_base 3: mod_base = OTHER; note = 2-O-methylribose adenine
  modified_base 3..4: mod_base = OTHER; note = S-phosphorothioate
  modified_base 4: mod_base = OTHER; note = 2-fluororibose uracil
  modified_base 4..5: mod_base = OTHER; note = S-phosphorothioate
  modified_base 5: mod_base = OTHER; note = 2-fluororibose adenine
  modified_base 5..6: mod_base = OTHER; note = S-phosphorothioate
  modified_base 6: mod_base = OTHER; note = 2-fluororibose adenine
  modified_base 6..7: mod_base = OTHER; note = S-phosphorothioate
  modified_base 7: mod_base = OTHER; note = 2-fluororibose uracil
  modified_base 8: mod_base = um
  modified_base 8..9: mod_base = OTHER; note = S-phosphorothioate
  modified_base 9: mod_base = OTHER; note = 2-fluororibose uracil
  modified_base 9..10: mod_base = OTHER; note = S-phosphorothioate
  modified_base 10: mod_base = OTHER; note = 2-fluororibose adenine
  modified_base 11: mod_base = cm
  modified_base 11..12: mod_base = OTHER; note = S-phosphorothioate
  modified_base 12: mod_base = OTHER; note = 2-fluororibose adenine
  modified_base 12..13: mod_base = OTHER; note R-N-(1,3-dimethylimidazolidin-2-ylidene)phosphoramidate
  modified_base 13: mod_base = cm
  modified_base 14: mod_base = OTHER; note = 2-fluororibose guanine
  modified_base 14..15: mod_base = OTHER; note = S-phosphorothioate
  modified_base 15: mod_base = OTHER; note = 2-fluororibose adenine
  modified_base 15..16: mod_base = OTHER; note R-N-(1,3-dimethylimidazolidin-2-ylidene)phosphoramidate
  modified_base 16: mod_base = OTHER; note = 2-fluororibose adenine
  modified_base 17: mod_base = OTHER; note = 2-O-methylribose adenine
  modified_base 17..18: mod_base = OTHER; note = S-phosphorothioate
  modified_base 18: mod_base = OTHER; note = 2-fluororibose guanine
  modified_base 18..19: mod_base = OTHER; note = S-phosphorothioate
  modified_base 19: mod_base = OTHER; note = 2-fluororibose cytosine
  modified_base 19..20: mod_base = OTHER; note = S-phosphorothioate
  modified_base 20: mod_base = OTHER; note = 2-fluororibose adenine
  modified_base 20..21: mod_base = OTHER; note R-N-(1,3-dimethylimidazolidin-2-ylidene)phosphoramidate
  modified_base 21: mod_base = OTHER; note = 2-fluororibose adenine
  modified_base 21..22: mod_base = OTHER; note = S-phosphorothioate
  modified_base 22: mod_base = um
  modified_base 23: mod_base = OTHER; note = 2-fluororibose guanine
  modified_base 23..24: mod_base = OTHER; note = S-phosphorothioate
  modified_base 24: mod_base = OTHER; note = 2-fluororibose cytosine
  modified_base 24..25: mod_base = OTHER; note = S-phosphorothioate
  modified_base 25: mod_base = OTHER; note = deoxyribose cytosine
  modified_base 25..26: mod_base = OTHER; note = S-phosphorothioate
  modified_base 26: mod_base = OTHER; note = deoxyribose adenine
  modified_base 26..27: mod_base = OTHER; note R-N-(1,3-dimethylimidazolidin-2-ylidene)phosphoramidate
  modified_base 27: mod_base = um
  modified_base 28: mod_base = OTHER; note = 2-fluororibose cytosine
  modified_base 28..29: mod_base = OTHER; note = S-phosphorothioate
  modified_base 29: mod_base = OTHER; note = 2-O-methylribose adenine
  modified_base 29..30: mod_base = OTHER; note R-N-(1,3-dimethylimidazolidin-2-ylidene)phosphoramidate
  modified_base 30: mod_base = cm
  source 1..30: mol_type = other RNA

SEQ ID NO: 672 - RNA, 30 nt, synthetic construct
  misc_feature 1..30: note = Synthetic: WV-44554
  misc_feature 1..30: note = Synthetic: ADR-0102145
  modified_base 1: mod_base = OTHER; note = 2-fluororibose cytosine
  modified_base 1..2: mod_base = OTHER; note R-N-(1,3-dimethylimidazolidin-2-ylidene)phosphoramidate
  modified_base 2: mod_base = OTHER; note = 2-fluororibose adenine
  modified_base 2..3: mod_base = OTHER; note = S-phosphorothioate
  modified_base 3: mod_base = OTHER; note = 2-fluororibose uracil
  modified_base 3..4: mod_base = OTHER; note = S-phosphorothioate
  modified_base 4: mod_base = OTHER; note = 2-fluororibose adenine
  modified_base 4..5: mod_base = OTHER; note = S-phosphorothioate
  modified_base 5: mod_base = OTHER; note = 2-fluororibose adenine
  modified_base 5..6: mod_base = OTHER; note = S-phosphorothioate
  modified_base 6: mod_base = OTHER; note = 2-fluororibose uracil
  modified_base 6..7: mod_base = OTHER; note = S-phosphorothioate
  modified_base 7: mod_base = OTHER; note = 2-fluororibose uracil
  modified_base 7..8: mod_base = OTHER; note = S-phosphorothioate
  modified_base 8: mod_base = OTHER; note = 2-fluororibose uracil
  modified_base 8..9: mod_base = OTHER; note = S-phosphorothioate
  modified_base 9: mod_base = OTHER; note = 2-fluororibose adenine
  modified_base 9..10: mod_base = OTHER; note = S-phosphorothioate
  modified_base 10: mod_base = OTHER; note = 2-fluororibose cytosine
  modified_base 10..11: mod_base = OTHER; note = S-phosphorothioate
  modified_base 11: mod_base = OTHER; note = 2-fluororibose adenine
  modified_base 11..12: mod_base = OTHER; note = S-phosphorothioate
  modified_base 12: mod_base = OTHER; note = 2-fluororibose cytosine
  modified_base 12..13: mod_base = OTHER; note = S-phosphorothioate
  modified_base 13: mod_base = OTHER; note = 2-fluororibose guanine
  modified_base 13..14: mod_base = OTHER; note = S-phosphorothioate
  modified_base 14: mod_base = OTHER; note = 2-fluororibose adenine
  modified_base 14..15: mod_base = OTHER; note = S-phosphorothioate
  modified_base 15: mod_base = OTHER; note = 2-fluororibose adenine
  modified_base 15..16: mod_base = OTHER; note = S-phosphorothioate
  modified_base 16: mod_base = OTHER; note = 2-O-methylribose adenine
  modified_base 16..17: mod_base = OTHER; note = S-phosphorothioate
  modified_base 17: mod_base = gm
  modified_base 17..18: mod_base = OTHER; note = S-phosphorothioate
  modified_base 18: mod_base = cm
  modified_base 18..19: mod_base = OTHER; note = S-phosphorothioate
  modified_base 19: mod_base = OTHER; note = 2-O-methylribose adenine
  modified_base 19..20: mod_base = OTHER; note = S-phosphorothioate
  modified_base 20: mod_base = OTHER; note = 2-O-methylribose adenine
  modified_base 20..21: mod_base = OTHER; note = S-phosphorothioate
  modified_base 21: mod_base = um
  modified_base 21..22: mod_base = OTHER; note = S-phosphorothioate
  modified_base 22: mod_base = gm
  modified_base 22..23: mod_base = OTHER; note = S-phosphorothioate
  modified_base 23: mod_base = OTHER; note = 2-fluororibose cytosine
  modified_base 23..24: mod_base = OTHER; note = S-phosphorothioate
  modified_base 24: mod_base = OTHER; note = deoxyribose cytosine
  modified_base 24..25: mod_base = OTHER; note = S-phosphorothioate
  modified_base 25: mod_base = OTHER; note = deoxyribose adenine
  modified_base 25..26: mod_base = OTHER; note R-N-(1,3-dimethylimidazolidin-2-ylidene)phosphoramidate
  modified_base 26: mod_base = um
  modified_base 26..27: mod_base = OTHER; note = S-phosphorothioate
  modified_base 27: mod_base = cm
  modified_base 27..28: mod_base = OTHER; note = S-phosphorothioate
  modified_base 28: mod_base = OTHER; note = 2-O-methylribose adenine
  modified_base 28..29: mod_base = OTHER; note = S-phosphorothioate
  modified_base 29: mod_base = cm
  modified_base 29..30: mod_base = OTHER; note R-N-(1,3-dimethylimidazolidin-2-ylidene)phosphoramidate
  modified_base 30: mod_base = cm
  source 1..30: mol_type = other RNA
cataatttacacgaaagcaatgccatcacc

SEQ ID NO: 673 - RNA, 30 nt, synthetic construct; identical to SEQ ID NO: 672
  misc_feature 1..30: note = Synthetic: WV-44555
  misc_feature 1..30: note = Synthetic: ADR-0102215
  modified_base 1: mod_base = cm
  modified_base 1..2: mod_base = OTHER; note R-N-(1,3-dimethylimidazolidin-2-ylidene)phosphoramidate
  modified_base 2: mod_base = OTHER; note = 2-O-methylribose adenine
  modified_base 2..3: mod_base = OTHER; note = S-phosphorothioate
  modified_base 3: mod_base = um
  modified_base 3..4: mod_base = OTHER; note = S-phosphorothioate
  modified_base 4: mod_base = OTHER; note = 2-fluororibose adenine
  modified_base 4..5: mod_base = OTHER; note = S-phosphorothioate
  modified_base 5: mod_base = OTHER; note = 2-fluororibose adenine
  modified_base 5..6: mod_base = OTHER; note = S-phosphorothioate
  modified_base 6: mod_base = OTHER; note = 2-fluororibose uracil
  modified_base 6..7: mod_base = OTHER; note = S-phosphorothioate
  modified_base 7: mod_base = OTHER; note = 2-fluororibose uracil
  modified_base 7..8: mod_base = OTHER; note = S-phosphorothioate
  modified_base 8: mod_base = OTHER; note = 2-fluororibose uracil
  modified_base 8..9: mod_base = OTHER; note = S-phosphorothioate
  modified_base 9: mod_base = OTHER; note = 2-fluororibose adenine
  modified_base 9..10: mod_base = OTHER; note = S-phosphorothioate
  modified_base 10: mod_base = OTHER; note = 2-fluororibose cytosine
  modified_base 10..11: mod_base = OTHER; note = S-phosphorothioate
  modified_base 11: mod_base = OTHER; note = 2-fluororibose adenine
  modified_base 11..12: mod_base = OTHER; note = S-phosphorothioate
  modified_base 12: mod_base = OTHER; note = 2-fluororibose cytosine
  modified_base 12..13: mod_base = OTHER; note = S-phosphorothioate
  modified_base 13: mod_base = OTHER; note = 2-fluororibose guanine
  modified_base 13..14: mod_base = OTHER; note = S-phosphorothioate
  modified_base 14: mod_base = OTHER; note = 2-fluororibose adenine
  modified_base 14..15: mod_base = OTHER; note = S-phosphorothioate
  modified_base 15: mod_base = OTHER; note = 2-fluororibose adenine
  modified_base 15..16: mod_base = OTHER; note = S-phosphorothioate
  modified_base 16: mod_base = OTHER; note = 2-fluororibose adenine
  modified_base 16..17: mod_base = OTHER; note = S-phosphorothioate
  modified_base 17: mod_base = OTHER; note = 2-fluororibose guanine
  modified_base 17..18: mod_base = OTHER; note = S-phosphorothioate
  modified_base 18: mod_base = OTHER; note = 2-fluororibose cytosine
  modified_base 18..19: mod_base = OTHER; note = S-phosphorothioate
  modified_base 19: mod_base = OTHER; note = 2-fluororibose adenine
  modified_base 19..20: mod_base = OTHER; note = S-phosphorothioate
  modified_base 20: mod_base = OTHER; note = 2-fluororibose adenine
  modified_base 20..21: mod_base = OTHER; note = S-phosphorothioate
  modified_base 21: mod_base = OTHER; note = 2-fluororibose uracil
  modified_base 21..22: mod_base = OTHER; note = S-phosphorothioate
  modified_base 22: mod_base = OTHER; note = 2-fluororibose guanine
  modified_base 22..23: mod_base = OTHER; note = S-phosphorothioate
  modified_base 23: mod_base = OTHER; note = 2-fluororibose cytosine
  modified_base 23..24: mod_base = OTHER; note = S-phosphorothioate
  modified_base 24: mod_base = OTHER; note = deoxyribose cytosine
  modified_base 24..25: mod_base = OTHER; note = S-phosphorothioate
  modified_base 25: mod_base = OTHER; note = deoxyribose adenine
  modified_base 25..26: mod_base = OTHER; note R-N-(1,3-dimethylimidazolidin-2-ylidene)phosphoramidate
  modified_base 26: mod_base = um
  modified_base 26..27: mod_base = OTHER; note = S-phosphorothioate
  modified_base 27: mod_base = OTHER; note = 2-fluororibose cytosine
  modified_base 27..28: mod_base = OTHER; note = S-phosphorothioate
  modified_base 28: mod_base = OTHER; note = 2-O-methylribose adenine
  modified_base 28..29: mod_base = OTHER; note = S-phosphorothioate
  modified_base 29: mod_base = cm
  modified_base 29..30: mod_base = OTHER; note R-N-(1,3-dimethylimidazolidin-2-ylidene)phosphoramidate
  modified_base 30: mod_base = cm
  source 1..30: mol_type = other RNA

SEQ ID NO: 674 - RNA, 30 nt, synthetic construct
  misc_feature 1..30: note = Synthetic: WV-44556
  misc_feature 1..30: note = Synthetic: ADR-0102216
  modified_base 1: mod_base = cm
  modified_base 1..2: mod_base = OTHER; note R-N-(1,3-dimethylimidazolidin-2-ylidene)phosphoramidate
  modified_base 2: mod_base = OTHER; note = 2-O-methylribose adenine
  modified_base 2..3: mod_base = OTHER; note = S-phosphorothioate
  modified_base 3: mod_base = um
  modified_base 3..4: mod_base = OTHER; note = S-phosphorothioate
  modified_base 4: mod_base = OTHER; note = 2-fluororibose adenine
  modified_base 4..5: mod_base = OTHER; note = S-phosphorothioate
  modified_base 5: mod_base = OTHER; note = 2-fluororibose adenine
  modified_base 5..6: mod_base = OTHER; note = S-phosphorothioate
  modified_base 6: mod_base = OTHER; note = 2-fluororibose uracil
  modified_base 6..7: mod_base = OTHER; note = S-phosphorothioate
  modified_base 7: mod_base = OTHER; note = 2-fluororibose uracil
  modified_base 7..8: mod_base = OTHER; note = S-phosphorothioate
  modified_base 8: mod_base = OTHER; note = 2-fluororibose uracil
  modified_base 8..9: mod_base = OTHER; note = S-phosphorothioate
  modified_base 9: mod_base = OTHER; note = 2-fluororibose adenine
  modified_base 9..10: mod_base = OTHER; note = S-phosphorothioate
  modified_base 10: mod_base = OTHER; note = 2-fluororibose cytosine
  modified_base 10..11: mod_base = OTHER; note = S-phosphorothioate
  modified_base 11: mod_base = OTHER; note = 2-fluororibose adenine
  modified_base 11..12: mod_base = OTHER; note = S-phosphorothioate
  modified_base 12: mod_base = OTHER; note = 2-fluororibose cytosine
  modified_base 12..13: mod_base = OTHER; note = S-phosphorothioate
  modified_base 13: mod_base = OTHER; note = 2-fluororibose guanine
  modified_base 13..14: mod_base = OTHER; note = S-phosphorothioate
  modified_base 14: mod_base = OTHER; note = 2-fluororibose adenine
  modified_base 14..15: mod_base = OTHER; note = S-phosphorothioate
  modified_base 15: mod_base = OTHER; note = 2-fluororibose adenine
  modified_base 15..16: mod_base = OTHER; note = S-phosphorothioate
  modified_base 16: mod_base = OTHER; note = 2-fluororibose adenine
  modified_base 16..17: mod_base = OTHER; note = S-phosphorothioate
  modified_base 17: mod_base = OTHER; note = 2-fluororibose guanine
  modified_base 17..18: mod_base = OTHER; note = S-phosphorothioate
  modified_base 18: mod_base = OTHER; note = 2-fluororibose cytosine
  modified_base 18..19: mod_base = OTHER; note = S-phosphorothioate
  modified_base 19: mod_base = OTHER; note = 2-fluororibose adenine
  modified_base 19..20: mod_base = OTHER; note = S-phosphorothioate
  modified_base 20: mod_base = OTHER; note = 2-fluororibose adenine
  modified_base 20..21: mod_base = OTHER; note = S-phosphorothioate
  modified_base 21: mod_base = OTHER; note = 2-fluororibose uracil
  modified_base 21..22: mod_base = OTHER; note = S-phosphorothioate
  modified_base 22: mod_base = OTHER; note = 2-fluororibose guanine
  modified_base 22..23: mod_base = OTHER; note = S-phosphorothioate
  modified_base 23: mod_base = OTHER; note = 2-fluororibose cytosine
  modified_base 23..24: mod_base = OTHER; note = S-phosphorothioate
  modified_base 24: mod_base = OTHER; note = deoxyribose uracil (position 3 connectivity)
  modified_base 24..25: mod_base = OTHER; note = S-phosphorothioate
  modified_base 25: mod_base = OTHER; note = deoxyribose adenine
  modified_base 25..26: mod_base = OTHER; note R-N-(1,3-dimethylimidazolidin-2-ylidene)phosphoramidate
  modified_base 26: mod_base = um
  modified_base 26..27: mod_base = OTHER; note = S-phosphorothioate
  modified_base 27: mod_base = OTHER; note = 2-fluororibose cytosine
  modified_base 27..28: mod_base = OTHER; note = S-phosphorothioate
  modified_base 28: mod_base = OTHER; note = 2-O-methylribose adenine
  modified_base 28..29: mod_base = OTHER; note = S-phosphorothioate
  modified_base 29: mod_base = cm
  modified_base 29..30: mod_base = OTHER; note R-N-(1,3-dimethylimidazolidin-2-ylidene)phosphoramidate
  modified_base 30: mod_base = cm
  source 1..30: mol_type = other RNA
cataatttacacgaaagcaatgctatcacc

SEQ ID NO: 675 - RNA, 30 nt, synthetic construct; identical to SEQ ID NO: 672
  misc_feature 1..30: note = Synthetic: WV-44557
  misc_feature 1..30: note = Synthetic: ADR-0102219
  modified_base 1: mod_base = cm
  modified_base 1..2: mod_base = OTHER; note R-N-(1,3-dimethylimidazolidin-2-ylidene)phosphoramidate
  modified_base 2: mod_base = OTHER; note = 2-O-methylribose adenine
  modified_base 2..3: mod_base = OTHER; note = S-phosphorothioate
  modified_base 3: mod_base = um
  modified_base 3..4: mod_base = OTHER; note = S-phosphorothioate
  modified_base 4: mod_base = OTHER; note = 2-fluororibose adenine
  modified_base 4..5: mod_base = OTHER; note = S-phosphorothioate
  modified_base 5: mod_base = OTHER; note = 2-fluororibose adenine
  modified_base 5..6: mod_base = OTHER; note = S-phosphorothioate
  modified_base 6: mod_base = um
  modified_base 7: mod_base = OTHER; note = 2-fluororibose uracil
  modified_base 7..8: mod_base = OTHER; note = S-phosphorothioate
  modified_base 8: mod_base = OTHER; note = 2-fluororibose uracil
  modified_base 8..9: mod_base = OTHER; note = S-phosphorothioate
  modified_base 9: mod_base = OTHER; note = 2-fluororibose adenine
  modified_base 9..10: mod_base = OTHER; note = S-phosphorothioate
  modified_base 10: mod_base = OTHER; note = 2-fluororibose cytosine
  modified_base 10..11: mod_base = OTHER; note = S-phosphorothioate
  modified_base 11: mod_base = OTHER; note = 2-fluororibose adenine
  modified_base 11..12: mod_base = OTHER; note R-N-(1,3-dimethylimidazolidin-2-ylidene)phosphoramidate
  modified_base 12: mod_base = OTHER; note = 2-fluororibose cytosine
  modified_base 12..13: mod_base = OTHER; note = S-phosphorothioate
  modified_base 13: mod_base = OTHER; note = 2-fluororibose guanine
  modified_base 14: mod_base = OTHER; note = 2-fluororibose adenine
  modified_base 14..15: mod_base = OTHER; note R-N-(1,3-dimethylimidazolidin-2-ylidene)phosphoramidate
  modified_base 15: mod_base = OTHER; note = 2-fluororibose adenine
  modified_base 15..16: mod_base = OTHER; note = S-phosphorothioate
  modified_base 16: mod_base = OTHER; note = 2-fluororibose adenine
  modified_base 16..17: mod_base = OTHER; note = S-phosphorothioate
  modified_base 17: mod_base = OTHER; note = 2-fluororibose guanine
  modified_base 17..18: mod_base = OTHER; note = S-phosphorothioate
  modified_base 18: mod_base = OTHER; note = 2-fluororibose cytosine
  modified_base 18..19: mod_base = OTHER; note = S-phosphorothioate
  modified_base 19: mod_base = OTHER; note = 2-fluororibose adenine
  modified_base 19..20: mod_base = OTHER; note = S-phosphorothioate
  modified_base 20: mod_base = OTHER; note = 2-O-methylribose adenine
  modified_base 21: mod_base = OTHER; note = 2-fluororibose uracil
  modified_base 21..22: mod_base = OTHER; note = S-phosphorothioate
  modified_base 22: mod_base = OTHER; note = 2-fluororibose guanine
  modified_base 22..23: mod_base = OTHER; note = S-phosphorothioate
  modified_base 23: mod_base = OTHER; note = 2-fluororibose cytosine
  modified_base 23..24: mod_base = OTHER; note = S-phosphorothioate
  modified_base 24: mod_base = OTHER; note = deoxyribose cytosine
  modified_base 24..25: mod_base = OTHER; note = S-phosphorothioate
  modified_base 25: mod_base = OTHER; note = deoxyribose adenine
  modified_base 25..26: mod_base = OTHER; note R-N-(1,3-dimethylimidazolidin-2-ylidene)phosphoramidate
  modified_base 26: mod_base = um
  modified_base 27: mod_base = OTHER; note = 2-fluororibose cytosine
  modified_base 27..28: mod_base = OTHER; note = S-phosphorothioate
  modified_base 28: mod_base = OTHER; note = 2-O-methylribose adenine
  modified_base 28..29: mod_base = OTHER; note = S-phosphorothioate
  modified_base 29: mod_base = cm
  modified_base 29..30: mod_base = OTHER; note R-N-(1,3-dimethylimidazolidin-2-ylidene)phosphoramidate
  modified_base 30: mod_base = cm
  source 1..30: mol_type = other RNA

SEQ ID NO: 676 - RNA, 30 nt, synthetic construct; identical to SEQ ID NO: 672
  misc_feature 1..30: note = Synthetic: WV-44558
  misc_feature 1..30: note = Synthetic: ADR-0102218
  modified_base 1: mod_base = cm
  modified_base 1..2: mod_base = OTHER; note R-N-(1,3-dimethylimidazolidin-2-ylidene)phosphoramidate
  modified_base 2: mod_base = OTHER; note = 2-O-methylribose adenine
  modified_base 2..3: mod_base = OTHER; note = S-phosphorothioate
  modified_base 3: mod_base = um
  modified_base 3..4: mod_base = OTHER; note = S-phosphorothioate
  modified_base 4: mod_base = OTHER; note = 2-fluororibose adenine
  modified_base 4..5: mod_base = OTHER; note = S-phosphorothioate
  modified_base 5: mod_base = OTHER; note = 2-fluororibose adenine
  modified_base 5..6: mod_base = OTHER; note = S-phosphorothioate
  modified_base 6: mod_base = OTHER; note = 2-fluororibose uracil
  modified_base 7: mod_base = um
  modified_base 7..8: mod_base = OTHER; note = S-phosphorothioate
  modified_base 8: mod_base = OTHER; note = 2-fluororibose uracil
  modified_base 8..9: mod_base = OTHER; note = S-phosphorothioate
  modified_base 9: mod_base = OTHER; note = 2-fluororibose adenine
  modified_base 10: mod_base = cm
  modified_base 10..11: mod_base = OTHER; note = S-phosphorothioate
  modified_base 11: mod_base = OTHER; note = 2-fluororibose adenine
  modified_base 11..12: mod_base = OTHER; note R-N-(1,3-dimethylimidazolidin-2-ylidene)phosphoramidate
  modified_base 12: mod_base = cm
  modified_base 13: mod_base = OTHER; note = 2-fluororibose guanine
  modified_base 13..14: mod_base = OTHER; note = S-phosphorothioate
  modified_base 14: mod_base = OTHER; note = 2-fluororibose adenine
  modified_base 14..15: mod_base = OTHER; note R-N-(1,3-dimethylimidazolidin-2-ylidene)phosphoramidate
  modified_base 15: mod_base = OTHER; note = 2-fluororibose adenine
  modified_base 16: mod_base = OTHER; note = 2-O-methylribose adenine
  modified_base 16..17: mod_base = OTHER; note = S-phosphorothioate
  modified_base 17: mod_base = OTHER; note = 2-fluororibose guanine
  modified_base 17..18: mod_base = OTHER; note = S-phosphorothioate
  modified_base 18: mod_base = OTHER; note = 2-fluororibose cytosine
  modified_base 18..19: mod_base = OTHER; note = S-phosphorothioate
  modified_base 19: mod_base = OTHER; note = 2-fluororibose adenine
  modified_base 19..20: mod_base = OTHER; note R-N-(1,3-dimethylimidazolidin-2-ylidene)phosphoramidate
  modified_base 20: mod_base = OTHER; note = 2-fluororibose adenine
  modified_base 20..21: mod_base = OTHER; note = S-phosphorothioate
  modified_base 21: mod_base = um
  modified_base 22: mod_base = OTHER; note = 2-fluororibose guanine
  modified_base 22..23: mod_base = OTHER; note = S-phosphorothioate
  modified_base 23: mod_base = OTHER; note = 2-fluororibose cytosine
  modified_base 23..24: mod_base = OTHER; note = S-phosphorothioate
  modified_base 24: mod_base = OTHER; note = deoxyribose cytosine
  modified_base 24..25: mod_base = OTHER; note = S-phosphorothioate
  modified_base 25: mod_base = OTHER; note = deoxyribose adenine
  modified_base 25..26: mod_base = OTHER; note R-N-(1,3-dimethylimidazolidin-2-ylidene)phosphoramidate
  modified_base 26: mod_base = um
  modified_base 27: mod_base = OTHER; note = 2-fluororibose cytosine
  modified_base 27..28: mod_base = OTHER; note = S-phosphorothioate
  modified_base 28: mod_base = OTHER; note = 2-O-methylribose adenine
  modified_base 28..29: mod_base = OTHER; note = S-phosphorothioate
  modified_base 29: mod_base = cm
  modified_base 29..30: mod_base = OTHER; note R-N-(1,3-dimethylimidazolidin-2-ylidene)phosphoramidate
  modified_base 30: mod_base = cm
  source 1..30: mol_type = other RNA

SEQ ID NO: 677 - RNA, 30 nt, synthetic construct; identical to SEQ ID NO: 672
  misc_feature 1..30: note = Synthetic: WV-44559
  misc_feature 1..30: note = Synthetic: ADR-0102217
  modified_base 1: mod_base = cm
  modified_base 1..2: mod_base = OTHER; note R-N-(1,3-dimethylimidazolidin-2-ylidene)phosphoramidate
  modified_base 2: mod_base = OTHER; note = 2-O-methylribose adenine
  modified_base 2..3: mod_base = OTHER; note = S-phosphorothioate
  modified_base 3: mod_base = um
  modified_base 3..4: mod_base = OTHER; note = S-phosphorothioate
  modified_base 4: mod_base = OTHER; note = 2-fluororibose adenine
  modified_base 4..5: mod_base = OTHER; note = S-phosphorothioate
  modified_base 5: mod_base = OTHER; note = 2-fluororibose adenine
  modified_base 5..6: mod_base = OTHER; note = S-phosphorothioate
  modified_base 6: mod_base = OTHER; note = 2-fluororibose uracil
  modified_base 7: mod_base = um
  modified_base 7..8: mod_base = OTHER; note = S-phosphorothioate
  modified_base 8: mod_base = OTHER; note = 2-fluororibose uracil
  modified_base 8..9: mod_base = OTHER; note = S-phosphorothioate
  modified_base 9: mod_base = OTHER; note = 2-fluororibose adenine
  modified_base 10: mod_base = cm
  modified_base 10..11: mod_base = OTHER; note = S-phosphorothioate
  modified_base 11: mod_base = OTHER; note = 2-fluororibose adenine
  modified_base 11..12: mod_base = OTHER; note = S-phosphorothioate
  modified_base 12: mod_base = cm
  modified_base 13: mod_base = OTHER; note = 2-fluororibose guanine
  modified_base 13..14: mod_base = OTHER; note = S-phosphorothioate
  modified_base 14: mod_base = OTHER; note = 2-fluororibose adenine
  modified_base 14..15: mod_base = OTHER; note = S-phosphorothioate
  modified_base 15: mod_base = OTHER; note = 2-fluororibose adenine
  modified_base 15..16: mod_base = OTHER; note = S-phosphorothioate
  modified_base 16: mod_base = OTHER; note = 2-O-methylribose adenine
  modified_base 17: mod_base = OTHER; note = 2-fluororibose guanine
  modified_base 17..18: mod_base = OTHER; note = S-phosphorothioate
  modified_base 18: mod_base = OTHER; note = 2-fluororibose cytosine
  modified_base 18..19: mod_base = OTHER; note = S-phosphorothioate
  modified_base 19: mod_base = OTHER; note = 2-fluororibose adenine
  modified_base 19..20: mod_base = OTHER; note = S-phosphorothioate
  modified_base 20: mod_base = OTHER; note = 2-fluororibose adenine
  modified_base 20..21: mod_base = OTHER; note = S-phosphorothioate
  modified_base 21: mod_base = um
  modified_base 22: mod_base = OTHER; note = 2-fluororibose guanine
  modified_base 22..23: mod_base = OTHER; note = S-phosphorothioate
  modified_base 23: mod_base = OTHER; note = 2-fluororibose cytosine
  modified_base 23..24: mod_base = OTHER; note = S-phosphorothioate
  modified_base 24: mod_base = OTHER; note = deoxyribose cytosine
  modified_base 24..25: mod_base = OTHER; note = S-phosphorothioate
  modified_base 25: mod_base = OTHER; note = deoxyribose adenine
  modified_base 25..26: mod_base = OTHER; note R-N-(1,3-dimethylimidazolidin-2-ylidene)phosphoramidate
  modified_base 26: mod_base = um
  modified_base 27: mod_base = OTHER; note = 2-fluororibose cytosine
  modified_base 27..28: mod_base = OTHER; note = S-phosphorothioate
  modified_base 28: mod_base = OTHER; note = 2-O-methylribose adenine
  modified_base 28..29: mod_base = OTHER; note = S-phosphorothioate
  modified_base 29: mod_base = cm
  modified_base 29..30: mod_base = OTHER; note R-N-(1,3-dimethylimidazolidin-2-ylidene)phosphoramidate
  modified_base 30: mod_base = cm
  source 1..30: mol_type = other RNA

SEQ ID NO: 678 - RNA, 30 nt, synthetic construct
  misc_feature 1..30: note = Synthetic: WV-47059
  misc_feature 1..30: note = Synthetic: ADR-0102271
  modified_base 1: mod_base = OTHER; note = 2-fluororibose cytosine
  modified_base 1..2: mod_base = OTHER; note R-N-(1,3-dimethylimidazolidin-2-ylidene)phosphoramidate
  modified_base 2: mod_base = OTHER; note = 2-fluororibose cytosine
  modified_base 2..3: mod_base = OTHER; note = S-phosphorothioate
  modified_base 3: mod_base = OTHER; note = 2-fluororibose adenine
  modified_base 3..4: mod_base = OTHER; note = S-phosphorothioate
  modified_base 4: mod_base = OTHER; note = 2-fluororibose adenine
  modified_base 4..5: mod_base = OTHER; note = S-phosphorothioate
  modified_base 5: mod_base = OTHER; note = 2-fluororibose cytosine
  modified_base 5..6: mod_base = OTHER; note = S-phosphorothioate
  modified_base 6: mod_base = OTHER; note = 2-fluororibose cytosine
  modified_base 6..7: mod_base = OTHER; note = S-phosphorothioate
  modified_base 7: mod_base = OTHER; note = 2-fluororibose adenine
  modified_base 7..8: mod_base = OTHER; note = S-phosphorothioate
  modified_base 8: mod_base = OTHER; note = 2-fluororibose guanine
  modified_base 8..9: mod_base = OTHER; note = S-phosphorothioate
  modified_base 9: mod_base = OTHER; note = 2-fluororibose adenine
  modified_base 9..10: mod_base = OTHER; note = S-phosphorothioate
  modified_base 10: mod_base = OTHER; note = 2-fluororibose adenine
  modified_base 10..11: mod_base = OTHER; note = S-phosphorothioate
  modified_base 11: mod_base = OTHER; note = 2-fluororibose adenine
  modified_base 11..12: mod_base = OTHER; note = S-phosphorothioate
  modified_base 12: mod_base = OTHER; note = 2-fluororibose uracil
  modified_base 12..13: mod_base = OTHER; note = S-phosphorothioate
  modified_base 13: mod_base = OTHER; note = 2-fluororibose uracil
  modified_base 13..14: mod_base = OTHER; note = S-phosphorothioate
  modified_base 14: mod_base = OTHER; note = 2-fluororibose guanine
  modified_base 14..15: mod_base = OTHER; note = S-phosphorothioate
  modified_base 15: mod_base = OTHER; note = 2-fluororibose guanine
  modified_base 15..16: mod_base = OTHER; note = S-phosphorothioate
  modified_base 16: mod_base = cm
  modified_base 16..17: mod_base = OTHER; note = S-phosphorothioate
  modified_base 17: mod_base = OTHER; note = 2-O-methylribose adenine
  modified_base 17..18: mod_base = OTHER; note = S-phosphorothioate
  modified_base 18: mod_base = cm
  modified_base 18..19: mod_base = OTHER; note = S-phosphorothioate
  modified_base 19: mod_base = OTHER; note = 2-O-methylribose adenine
  modified_base 19..20: mod_base = OTHER; note = S-phosphorothioate
  modified_base 20: mod_base = OTHER; note = 2-O-methylribose adenine
  modified_base 20..21: mod_base = OTHER; note = S-phosphorothioate
  modified_base 21: mod_base = OTHER; note = 2-O-methylribose adenine
  modified_base 21..22: mod_base = OTHER; note = S-phosphorothioate
  modified_base 22: mod_base = um
  modified_base 22..23: mod_base = OTHER; note = S-phosphorothioate
  modified_base 23: mod_base = gm
  modified_base 23..24: mod_base = OTHER; note = S-phosphorothioate
  modified_base 24: mod_base = OTHER; note = 2-fluororibose cytosine
  modified_base 24..25: mod_base = OTHER; note = S-phosphorothioate
  modified_base 25: mod_base = OTHER; note = deoxyribose cytosine
  modified_base 25..26: mod_base = OTHER; note = S-phosphorothioate
  modified_base 26: mod_base = OTHER; note = deoxyribose adenine
  modified_base 26..27: mod_base = OTHER; note R-N-(1,3-dimethylimidazolidin-2-ylidene)phosphoramidate
  modified_base 27: mod_base = cm
  modified_base 27..28: mod_base = OTHER; note = S-phosphorothioate
  modified_base 28: mod_base = um
  modified_base 28..29: mod_base = OTHER; note = S-phosphorothioate
  modified_base 29: mod_base = gm
  modified_base 29..30: mod_base = OTHER; note R-N-(1,3-dimethylimidazolidin-2-ylidene)phosphoramidate
  modified_base 30: mod_base = um
  source 1..30: mol_type = other RNA
ccaaccagaaattggcacaaatgccactgt

SEQ ID NO: 679 - RNA, 30 nt, synthetic construct; identical to SEQ ID NO: 678
  misc_feature 1..30: note = Synthetic: WV-47060
  misc_feature 1..30: note = Synthetic: ADR-0102274
  modified_base 1: mod_base = cm
  modified_base 1..2: mod_base = OTHER; note R-N-(1,3-dimethylimidazolidin-2-ylidene)phosphoramidate
  modified_base 2: mod_base = cm
  modified_base 2..3: mod_base = OTHER; note = S-phosphorothioate
  modified_base 3: mod_base = OTHER; note = 2-O-methylribose adenine
  modified_base 3..4: mod_base = OTHER; note = S-phosphorothioate
  modified_base 4: mod_base = OTHER; note = 2-fluororibose adenine
  modified_base 4..5: mod_base = OTHER; note = S-phosphorothioate
  modified_base 5: mod_base = OTHER; note = 2-fluororibose cytosine
  modified_base 5..6: mod_base = OTHER; note = S-phosphorothioate
  modified_base 6: mod_base = OTHER; note = 2-fluororibose cytosine
  modified_base 6..7: mod_base = OTHER; note = S-phosphorothioate
  modified_base 7: mod_base = OTHER; note = 2-fluororibose adenine
  modified_base 7..8: mod_base = OTHER; note = S-phosphorothioate
  modified_base 8: mod_base = OTHER; note = 2-fluororibose guanine
  modified_base 8..9: mod_base = OTHER; note = S-phosphorothioate
  modified_base 9: mod_base = OTHER; note = 2-fluororibose adenine
  modified_base 9..10: mod_base = OTHER; note = S-phosphorothioate
  modified_base 10: mod_base = OTHER; note = 2-fluororibose adenine
  modified_base 10..11: mod_base = OTHER; note = S-phosphorothioate
  modified_base 11: mod_base = OTHER; note = 2-fluororibose adenine
  modified_base 11..12: mod_base = OTHER; note = S-phosphorothioate
  modified_base 12: mod_base = OTHER; note = 2-fluororibose uracil
  modified_base 12..13: mod_base = OTHER; note = S-phosphorothioate
  modified_base 13: mod_base = OTHER; note = 2-fluororibose uracil
  modified_base 13..14: mod_base = OTHER; note = S-phosphorothioate
  modified_base 14: mod_base = OTHER; note = 2-fluororibose guanine
  modified_base 14..15: mod_base = OTHER; note = S-phosphorothioate
  modified_base 15: mod_base = OTHER; note = 2-fluororibose guanine
  modified_base 15..16: mod_base = OTHER; note = S-phosphorothioate
  modified_base 16: mod_base = OTHER; note = 2-fluororibose cytosine
  modified_base 16..17: mod_base = OTHER; note = S-phosphorothioate
  modified_base 17: mod_base = OTHER; note = 2-fluororibose adenine
  modified_base 17..18: mod_base = OTHER; note = S-phosphorothioate
  modified_base 18: mod_base = OTHER; note = 2-fluororibose cytosine
  modified_base 18..19: mod_base = OTHER; note = S-phosphorothioate
  modified_base 19: mod_base = OTHER; note = 2-fluororibose adenine
  modified_base 19..20: mod_base = OTHER; note = S-phosphorothioate
  modified_base 20: mod_base = OTHER; note = 2-fluororibose adenine
  modified_base 20..21: mod_base = OTHER; note = S-phosphorothioate
  modified_base 21: mod_base = OTHER; note = 2-fluororibose adenine
  modified_base 21..22: mod_base = OTHER; note = S-phosphorothioate
  modified_base 22: mod_base = OTHER; note = 2-fluororibose uracil
  modified_base 22..23: mod_base = OTHER; note = S-phosphorothioate
  modified_base 23: mod_base = OTHER; note = 2-fluororibose guanine
  modified_base 23..24: mod_base = OTHER; note = S-phosphorothioate
  modified_base 24: mod_base = OTHER; note = 2-fluororibose cytosine
  modified_base 24..25: mod_base = OTHER; note = S-phosphorothioate
  modified_base 25: mod_base = OTHER; note = deoxyribose cytosine
  modified_base 25..26: mod_base = OTHER; note = S-phosphorothioate
  modified_base 26: mod_base = OTHER; note = deoxyribose adenine
  modified_base 26..27: mod_base = OTHER; note R-N-(1,3-dimethylimidazolidin-2-ylidene)phosphoramidate
  modified_base 27: mod_base = cm
  modified_base 27..28: mod_base = OTHER; note = S-phosphorothioate
  modified_base 28: mod_base = OTHER; note = 2-fluororibose uracil
  modified_base 28..29: mod_base = OTHER; note = S-phosphorothioate
  modified_base 29: mod_base = gm
  modified_base 29..30: mod_base = OTHER; note R-N-(1,3-dimethylimidazolidin-2-ylidene)phosphoramidate
  modified_base 30: mod_base = um
  source 1..30: mol_type = other RNA

SEQ ID NO: 680 - RNA, 30 nt, synthetic construct; identical to SEQ ID NO: 678
  misc_feature 1..30: note = Synthetic: WV-47061
  misc_feature 1..30: note = Synthetic: ADR-0102275
  modified_base 1: mod_base = cm
  modified_base 1..2: mod_base = OTHER; note R-N-(1,3-dimethylimidazolidin-2-ylidene)phosphoramidate
  modified_base 2: mod_base = cm
  modified_base 2..3: mod_base = OTHER; note = S-phosphorothioate
  modified_base 3: mod_base = OTHER; note = 2-O-methylribose adenine
  modified_base 3..4: mod_base = OTHER; note = S-phosphorothioate
  modified_base 4: mod_base = OTHER; note = 2-fluororibose adenine
  modified_base 4..5: mod_base = OTHER; note = S-phosphorothioate
  modified_base 5: mod_base = OTHER; note = 2-fluororibose cytosine
  modified_base 5..6: mod_base = OTHER; note = S-phosphorothioate
  modified_base 6: mod_base = OTHER; note = 2-fluororibose cytosine
  modified_base 6..7: mod_base = OTHER; note = S-phosphorothioate
  modified_base 7: mod_base = OTHER; note = 2-fluororibose adenine
  modified_base 7..8: mod_base = OTHER; note = S-phosphorothioate
  modified_base 8: mod_base = OTHER; note = 2-fluororibose guanine
  modified_base 8..9: mod_base = OTHER; note = S-phosphorothioate
  modified_base 9: mod_base = OTHER; note = 2-fluororibose adenine
  modified_base 9..10: mod_base = OTHER; note = S-phosphorothioate
  modified_base 10: mod_base = OTHER; note = 2-fluororibose adenine
  modified_base 10..11: mod_base = OTHER; note = S-phosphorothioate
  modified_base 11: mod_base = OTHER; note = 2-fluororibose adenine
  modified_base 11..12: mod_base = OTHER; note = S-phosphorothioate
  modified_base 12: mod_base = OTHER; note = 2-fluororibose uracil
  modified_base 12..13: mod_base = OTHER; note = S-phosphorothioate
  modified_base 13: mod_base = OTHER; note = 2-fluororibose uracil
  modified_base 13..14: mod_base = OTHER; note = S-phosphorothioate
  modified_base 14: mod_base = OTHER; note = 2-fluororibose guanine
  modified_base 14..15: mod_base = OTHER; note = S-phosphorothioate
  modified_base 15: mod_base = OTHER; note = 2-fluororibose guanine
  modified_base 15..16: mod_base = OTHER; note = S-phosphorothioate
  modified_base 16: mod_base = OTHER; note = 2-fluororibose cytosine
  modified_base 16..17: mod_base = OTHER; note = S-phosphorothioate
  modified_base 17: mod_base = OTHER; note = 2-fluororibose adenine
  modified_base 17..18: mod_base = OTHER; note = S-phosphorothioate
  modified_base 18: mod_base = OTHER; note = 2-fluororibose cytosine
  modified_base 18..19: mod_base = OTHER; note = S-phosphorothioate
  modified_base 19: mod_base = OTHER; note = 2-fluororibose adenine
  modified_base 19..20: mod_base = OTHER; note = S-phosphorothioate
  modified_base 20: mod_base = OTHER; note = 2-fluororibose adenine
  modified_base 20..21: mod_base = OTHER; note = S-phosphorothioate
  modified_base 21: mod_base = OTHER; note = 2-fluororibose adenine
  modified_base 21..22: mod_base = OTHER; note = S-phosphorothioate
  modified_base 22: mod_base = OTHER; note = 2-fluororibose uracil
  modified_base 22..23: mod_base = OTHER; note = S-phosphorothioate
  modified_base 23: mod_base = OTHER; note = 2-fluororibose guanine
  modified_base 23..24: mod_base = OTHER; note = S-phosphorothioate
  modified_base 24: mod_base = OTHER; note = 2-fluororibose cytosine
  modified_base 24..25: mod_base = OTHER; note = S-phosphorothioate
  modified_base 25: mod_base = OTHER; note = deoxyribose cytosine
  modified_base 25..26: mod_base = OTHER; note = S-phosphorothioate
  modified_base 26: mod_base = OTHER; note = deoxyribose adenine
  modified_base 26..27: mod_base = OTHER; note R-N-(1,3-dimethylimidazolidin-2-ylidene)phosphoramidate
  modified_base 27: mod_base = cm
  modified_base 27..28: mod_base = OTHER; note = S-phosphorothioate
  modified_base 28: mod_base = um
  modified_base 28..29: mod_base = OTHER; note = S-phosphorothioate
  modified_base 29: mod_base = gm
  modified_base 29..30: mod_base = OTHER; note R-N-(1,3-dimethylimidazolidin-2-ylidene)phosphoramidate
  modified_base 30: mod_base = um
  source 1..30: mol_type = other RNA

SEQ ID NO: 681 - RNA, 30 nt, synthetic construct
  misc_feature 1..30: note = Synthetic: WV-44551
  misc_feature 1..30: note = Synthetic: ADR-0102427
  modified_base 1: mod_base = OTHER; note = 2-fluororibose uracil
  modified_base 1..2: mod_base = OTHER; note R-N-(1,3-dimethylimidazolidin-2-ylidene)phosphoramidate
  modified_base 2: mod_base = OTHER; note = 2-fluororibose adenine
  modified_base 2..3: mod_base = OTHER; note = S-phosphorothioate
  modified_base 3: mod_base = OTHER; note = 2-fluororibose adenine
  modified_base 3..4: mod_base = OTHER; note = S-phosphorothioate
  modified_base 4: mod_base = OTHER; note = 2-fluororibose uracil
  modified_base 4..5: mod_base = OTHER; note = S-phosphorothioate
  modified_base 5: mod_base = OTHER; note = 2-fluororibose cytosine
  modified_base 5..6: mod_base = OTHER; note = S-phosphorothioate
  modified_base 6: mod_base = OTHER; note = 2-fluororibose cytosine
  modified_base 6..7: mod_base = OTHER; note = S-phosphorothioate
  modified_base 7: mod_base = OTHER; note = 2-fluororibose adenine
  modified_base 7..8: mod_base = OTHER; note = S-phosphorothioate
  modified_base 8: mod_base = OTHER; note = 2-fluororibose uracil
  modified_base 8..9: mod_base = OTHER; note = S-phosphorothioate
  modified_base 9: mod_base = OTHER; note = 2-fluororibose cytosine
  modified_base 9..10: mod_base = OTHER; note = S-phosphorothioate
  modified_base 10: mod_base = OTHER; note = 2-fluororibose uracil
  modified_base 10..11: mod_base = OTHER; note = S-phosphorothioate
  modified_base 11: mod_base = OTHER; note = 2-fluororibose cytosine
  modified_base 11..12: mod_base = OTHER; note = S-phosphorothioate
  modified_base 12: mod_base = OTHER; note = 2-fluororibose uracil
  modified_base 12..13: mod_base = OTHER; note = S-phosphorothioate
  modified_base 13: mod_base = OTHER; note = 2-fluororibose uracil
  modified_base 13..14: mod_base = OTHER; note = S-phosphorothioate
  modified_base 14: mod_base = OTHER; note = 2-fluororibose cytosine
  modified_base 14..15: mod_base = OTHER; note = S-phosphorothioate
  modified_base 15: mod_base = OTHER; note = 2-fluororibose adenine
  modified_base 15..16: mod_base = OTHER; note = S-phosphorothioate
  modified_base 16: mod_base = gm
  modified_base 16..17: mod_base = OTHER; note = S-phosphorothioate
  modified_base 17: mod_base = OTHER; note = 2-O-methylribose adenine
  modified_base 17..18: mod_base = OTHER; note = S-phosphorothioate
  modified_base 18: mod_base = um
  modified_base 18..19: mod_base = OTHER; note = S-phosphorothioate
  modified_base 19: mod_base = OTHER; note = 2-O-methylribose adenine
  modified_base 19..20: mod_base = OTHER; note = S-phosphorothioate
  modified_base 20: mod_base = um
  modified_base 20..21: mod_base = OTHER; note = S-phosphorothioate
  modified_base 21: mod_base = gm
  modified_base 21..22: mod_base = OTHER; note = S-phosphorothioate
  modified_base 22: mod_base = um
  modified_base 22..23: mod_base = OTHER; note = S-phosphorothioate
  modified_base 23: mod_base = OTHER; note = 2-fluororibose cytosine
  modified_base 23..24: mod_base = OTHER; note = S-phosphorothioate
  modified_base 24: mod_base = OTHER; note = deoxyribose cytosine
  modified_base 24..25: mod_base = OTHER; note = S-phosphorothioate
  modified_base 25: mod_base = OTHER; note = deoxyribose adenine
  modified_base 25..26: mod_base = OTHER; note R-N-(1,3-dimethylimidazolidin-2-ylidene)phosphoramidate
  modified_base 26: mod_base = cm
  modified_base 26..27: mod_base = OTHER; note = S-phosphorothioate
  modified_base 27: mod_base = OTHER; note = 2-O-methylribose adenine
  modified_base 27..28: mod_base = OTHER; note = S-phosphorothioate
  modified_base 28: mod_base = gm
  modified_base 28..29: mod_base = OTHER; note = S-phosphorothioate
  modified_base 29: mod_base = OTHER; note = 2-O-methylribose adenine
  modified_base 29..30: mod_base = OTHER; note R-N-(1,3-dimethylimidazolidin-2-ylidene)phosphoramidate
  modified_base 30: mod_base = OTHER; note = 2-O-methylribose adenine
  source 1..30: mol_type = other RNA
taatccatctcttcagatatgtccacagaa

SEQ ID NO: 682 - RNA, 30 nt, synthetic construct; identical to SEQ ID NO: 681
  misc_feature 1..30: note = Synthetic: WV-44552
  misc_feature 1..30: note = Synthetic: ADR-0102429
  modified_base 1: mod_base = um
  modified_base 1..2: mod_base = OTHER; note R-N-(1,3-dimethylimidazolidin-2-ylidene)phosphoramidate
  modified_base 2: mod_base = OTHER; note = 2-O-methylribose adenine
  modified_base 2..3: mod_base = OTHER; note = S-phosphorothioate
  modified_base 3: mod_base = OTHER; note = 2-O-methylribose adenine
  modified_base 3..4: mod_base = OTHER; note = S-phosphorothioate
  modified_base 4: mod_base = OTHER; note = 2-fluororibose uracil
  modified_base 4..5: mod_base = OTHER; note = S-phosphorothioate
  modified_base 5: mod_base = OTHER; note = 2-fluororibose cytosine
  modified_base 5..6: mod_base = OTHER; note = S-phosphorothioate
  modified_base 6: mod_base = OTHER; note = 2-fluororibose cytosine
  modified_base 6..7: mod_base = OTHER; note = S-phosphorothioate
  modified_base 7: mod_base = OTHER; note = 2-fluororibose adenine
  modified_base 7..8: mod_base = OTHER; note = S-phosphorothioate
  modified_base 8: mod_base = OTHER; note = 2-fluororibose uracil
  modified_base 8..9: mod_base = OTHER; note = S-phosphorothioate
  modified_base 9: mod_base = OTHER; note = 2-fluororibose cytosine
  modified_base 9..10: mod_base = OTHER; note = S-phosphorothioate
  modified_base 10: mod_base = OTHER; note = 2-fluororibose uracil
  modified_base 10..11: mod_base = OTHER; note = S-phosphorothioate
  modified_base 11: mod_base = OTHER; note = 2-fluororibose cytosine
  modified_base 11..12: mod_base = OTHER; note = S-phosphorothioate
  modified_base 12: mod_base = OTHER; note = 2-fluororibose uracil
  modified_base 12..13: mod_base = OTHER; note = S-phosphorothioate
  modified_base 13: mod_base = OTHER; note = 2-fluororibose uracil
  modified_base 13..14: mod_base = OTHER; note = S-phosphorothioate
  modified_base 14: mod_base = OTHER; note = 2-fluororibose cytosine
  modified_base 14..15: mod_base = OTHER; note = S-phosphorothioate
  modified_base 15: mod_base = OTHER; note = 2-fluororibose adenine
  modified_base 15..16: mod_base = OTHER; note = S-phosphorothioate
  modified_base 16: mod_base = OTHER; note = 2-fluororibose guanine
  modified_base 16..17: mod_base = OTHER; note = S-phosphorothioate
  modified_base 17: mod_base = OTHER; note = 2-fluororibose adenine
  modified_base 17..18: mod_base = OTHER; note = S-phosphorothioate
  modified_base 18: mod_base = OTHER; note = 2-fluororibose uracil
  modified_base 18..19: mod_base = OTHER; note = S-phosphorothioate
  modified_base 19: mod_base = OTHER; note = 2-fluororibose adenine
  modified_base 19..20: mod_base = OTHER; note = S-phosphorothioate
  modified_base 20: mod_base = OTHER; note = 2-fluororibose uracil
  modified_base 20..21: mod_base = OTHER; note = S-phosphorothioate
  modified_base 21: mod_base = OTHER; note = 2-fluororibose guanine
  modified_base 21..22: mod_base = OTHER; note = S-phosphorothioate
  modified_base 22: mod_base = OTHER; note = 2-fluororibose uracil
  modified_base 22..23: mod_base = OTHER; note = S-phosphorothioate
  modified_base 23: mod_base = OTHER; note = 2-fluororibose cytosine
  modified_base 23..24: mod_base = OTHER; note = S-phosphorothioate
  modified_base 24: mod_base = OTHER; note = deoxyribose cytosine
  modified_base 24..25: mod_base = OTHER; note = S-phosphorothioate
  modified_base 25: mod_base = OTHER; note = deoxyribose adenine
  modified_base 25..26: mod_base = OTHER; note R-N-(1,3-dimethylimidazolidin-2-ylidene)phosphoramidate
  modified_base 26: mod_base = cm
  modified_base 26..27: mod_base = OTHER; note = S-phosphorothioate
  modified_base 27: mod_base = OTHER; note = 2-fluororibose adenine
  modified_base 27..28: mod_base = OTHER; note = S-phosphorothioate
  modified_base 28: mod_base = gm
  modified_base 28..29: mod_base = OTHER; note = S-phosphorothioate
  modified_base 29: mod_base = OTHER; note = 2-O-methylribose adenine
  modified_base 29..30: mod_base = OTHER; note R-N-(1,3-dimethylimidazolidin-2-ylidene)phosphoramidate
  modified_base 30: mod_base = OTHER; note = 2-O-methylribose adenine
  source 1..30: mol_type = other RNA

SEQ ID NO: 683 - RNA, 30 nt, synthetic construct
  misc_feature 1..30: note = Synthetic: WV-44553
  misc_feature 1..30: note = Synthetic: ADR-0102430
  modified_base 1: mod_base = um
  modified_base 1..2: mod_base = OTHER; note R-N-(1,3-dimethylimidazolidin-2-ylidene)phosphoramidate
  modified_base 2: mod_base = OTHER; note = 2-O-methylribose adenine
  modified_base 2..3: mod_base = OTHER; note = S-phosphorothioate
  modified_base 3: mod_base = OTHER; note = 2-O-methylribose adenine
  modified_base 3..4: mod_base = OTHER; note = S-phosphorothioate
  modified_base 4: mod_base = OTHER; note = 2-fluororibose uracil
  modified_base 4..5: mod_base = OTHER; note = S-phosphorothioate
  modified_base 5: mod_base = OTHER; note = 2-fluororibose cytosine
  modified_base 5..6: mod_base = OTHER; note = S-phosphorothioate
  modified_base 6: mod_base = OTHER; note = 2-fluororibose cytosine
  modified_base 6..7: mod_base = OTHER; note = S-phosphorothioate
  modified_base 7: mod_base = OTHER; note = 2-fluororibose adenine
  modified_base 7..8: mod_base = OTHER; note = S-phosphorothioate
  modified_base 8: mod_base = OTHER; note = 2-fluororibose uracil
  modified_base 8..9: mod_base = OTHER; note = S-phosphorothioate
  modified_base 9: mod_base = OTHER; note = 2-fluororibose cytosine
  modified_base 9..10: mod_base = OTHER; note = S-phosphorothioate
  modified_base 10: mod_base = OTHER; note = 2-fluororibose uracil
  modified_base 10..11: mod_base = OTHER; note = S-phosphorothioate
  modified_base 11: mod_base = OTHER; note = 2-fluororibose cytosine
  modified_base 11..12: mod_base = OTHER; note = S-phosphorothioate
  modified_base 12: mod_base = OTHER; note = 2-fluororibose uracil
  modified_base 12..13: mod_base = OTHER; note = S-phosphorothioate
  modified_base 13: mod_base = OTHER; note = 2-fluororibose uracil
  modified_base 13..14: mod_base = OTHER; note = S-phosphorothioate
  modified_base 14: mod_base = OTHER; note = 2-fluororibose cytosine
  modified_base 14..15: mod_base = OTHER; note = S-phosphorothioate
  modified_base 15: mod_base = OTHER; note = 2-fluororibose adenine
  modified_base 15..16: mod_base = OTHER; note = S-phosphorothioate
  modified_base 16: mod_base = OTHER; note = 2-fluororibose guanine
  modified_base 16..17: mod_base = OTHER; note = S-phosphorothioate
  modified_base 17: mod_base = OTHER; note = 2-fluororibose adenine
  modified_base 17..18: mod_base = OTHER; note = S-phosphorothioate
  modified_base 18: mod_base = OTHER; note = 2-fluororibose uracil
  modified_base 18..19: mod_base = OTHER; note = S-phosphorothioate
  modified_base 19: mod_base = OTHER; note = 2-fluororibose adenine
  modified_base 19..20: mod_base = OTHER; note = S-phosphorothioate
  modified_base 20: mod_base = OTHER; note = 2-fluororibose uracil
  modified_base 20..21: mod_base = OTHER; note = S-phosphorothioate
  modified_base 21: mod_base = OTHER; note = 2-fluororibose guanine
  modified_base 21..22: mod_base = OTHER; note = S-phosphorothioate
  modified_base 22: mod_base = OTHER; note = 2-fluororibose uracil
  modified_base 22..23: mod_base = OTHER; note = S-phosphorothioate
  modified_base 23: mod_base = OTHER; note = 2-fluororibose cytosine
  modified_base 23..24: mod_base = OTHER; note = S-phosphorothioate
  modified_base 24: mod_base = OTHER; note = deoxyribose uracil (position 3 connectivity)
  modified_base 24..25: mod_base = OTHER; note = S-phosphorothioate
  modified_base 25: mod_base = OTHER; note = deoxyribose adenine
  modified_base 25..26: mod_base = OTHER; note R-N-(1,3-dimethylimidazolidin-2-ylidene)phosphoramidate
  modified_base 26: mod_base = cm
  modified_base 26..27: mod_base = OTHER; note = S-phosphorothioate
  modified_base 27: mod_base = OTHER; note = 2-fluororibose adenine
  modified_base 27..28: mod_base = OTHER; note = S-phosphorothioate
  modified_base 28: mod_base = gm
  modified_base 28..29: mod_base = OTHER; note = S-phosphorothioate
  modified_base 29: mod_base = OTHER; note = 2-O-methylribose adenine
  modified_base 29..30: mod_base = OTHER; note R-N-(1,3-dimethylimidazolidin-2-ylidene)phosphoramidate
  modified_base 30: mod_base = OTHER; note = 2-O-methylribose adenine
  source 1..30: mol_type = other RNA
taatccatctcttcagatatgtctacagaa

SEQ ID NO: 684 - RNA, 30 nt, synthetic construct
  misc_feature 1..30: note = Synthetic: WV-47062
  misc_feature 1..30: note = Synthetic: ADR-0102428
  modified_base 1: mod_base = OTHER; note = 2-fluororibose uracil
  modified_base 1..2: mod_base = OTHER; note R-N-(1,3-dimethylimidazolidin-2-ylidene)phosphoramidate
  modified_base 2: mod_base = OTHER; note = 2-fluororibose uracil
  modified_base 2..3: mod_base = OTHER; note = S-phosphorothioate
  modified_base 3: mod_base = OTHER; note = 2-fluororibose adenine
  modified_base 3..4: mod_base = OTHER; note = S-phosphorothioate
  modified_base 4: mod_base = OTHER; note = 2-fluororibose adenine
  modified_base 4..5: mod_base = OTHER; note = S-phosphorothioate
  modified_base 5: mod_base = OTHER; note = 2-fluororibose uracil
  modified_base 5..6: mod_base = OTHER; note = S-phosphorothioate
  modified_base 6: mod_base = OTHER; note = 2-fluororibose cytosine
  modified_base 6..7: mod_base = OTHER; note = S-phosphorothioate
  modified_base 7: mod_base = OTHER; note = 2-fluororibose cytosine
  modified_base 7..8: mod_base = OTHER; note = S-phosphorothioate
  modified_base 8: mod_base = OTHER; note = 2-fluororibose adenine
  modified_base 8..9: mod_base = OTHER; note = S-phosphorothioate
  modified_base 9: mod_base = OTHER; note = 2-fluororibose uracil
  modified_base 9..10: mod_base = OTHER; note = S-phosphorothioate
  modified_base 10: mod_base = OTHER; note = 2-fluororibose cytosine
  modified_base 10..11: mod_base = OTHER; note = S-phosphorothioate
  modified_base 11: mod_base = OTHER; note = 2-fluororibose uracil
  modified_base 11..12: mod_base = OTHER; note = S-phosphorothioate
  modified_base 12: mod_base = OTHER; note = 2-fluororibose cytosine
  modified_base 12..13: mod_base = OTHER; note = S-phosphorothioate
  modified_base 13: mod_base = OTHER; note = 2-fluororibose uracil
  modified_base 13..14: mod_base = OTHER; note = S-phosphorothioate
  modified_base 14: mod_base = OTHER; note = 2-fluororibose uracil
  modified_base 14..15: mod_base = OTHER; note = S-phosphorothioate
  modified_base 15: mod_base = OTHER; note = 2-fluororibose cytosine
  modified_base 15..16: mod_base = OTHER; note = S-phosphorothioate
  modified_base 16: mod_base = OTHER; note = 2-O-methylribose adenine
  modified_base 16..17: mod_base = OTHER; note = S-phosphorothioate
  modified_base 17: mod_base = gm
  modified_base 17..18: mod_base = OTHER; note = S-phosphorothioate
  modified_base 18: mod_base = OTHER; note = 2-O-methylribose adenine
  modified_base 18..19: mod_base = OTHER; note = S-phosphorothioate
  modified_base 19: mod_base = um
  modified_base 19..20: mod_base = OTHER; note = S-phosphorothioate
  modified_base 20: mod_base = OTHER; note = 2-O-methylribose adenine
  modified_base 20..21: mod_base = OTHER; note = S-phosphorothioate
  modified_base 21: mod_base = um
  modified_base 21..22: mod_base = OTHER; note = S-phosphorothioate
  modified_base 22: mod_base = gm
  modified_base 22..23: mod_base = OTHER; note = S-phosphorothioate
  modified_base 23: mod_base = um
  modified_base 23..24: mod_base = OTHER; note = S-phosphorothioate
  modified_base 24: mod_base = OTHER; note = 2-fluororibose cytosine
  modified_base 24..25: mod_base = OTHER; note = S-phosphorothioate
  modified_base 25: mod_base = OTHER; note = deoxyribose cytosine
  modified_base 25..26: mod_base = OTHER; note = S-phosphorothioate
  modified_base 26: mod_base = OTHER; note = deoxyribose adenine
  modified_base 26..27: mod_base = OTHER; note R-N-(1,3-dimethylimidazolidin-2-ylidene)phosphoramidate
  modified_base 27: mod_base = cm
  modified_base 27..28: mod_base = OTHER; note = S-phosphorothioate
  modified_base 28: mod_base = OTHER; note = 2-O-methylribose adenine
  modified_base 28..29: mod_base = OTHER; note = S-phosphorothioate
  modified_base 29: mod_base = gm
  modified_base 29..30: mod_base = OTHER; note R-N-(1,3-dimethylimidazolidin-2-ylidene)phosphoramidate
  modified_base 30: mod_base = OTHER; note = 2-O-methylribose adenine
  source 1..30: mol_type = other RNA
ttaatccatctcttcagatatgtccacaga

SEQ ID NO: 685 - RNA, 30 nt, synthetic construct; identical to SEQ ID NO: 684
  misc_feature 1..30: note = Synthetic: WV-47063
  misc_feature 1..30: note = Synthetic: ADR-0102431
  modified_base 1: mod_base = um
  modified_base 1..2: mod_base = OTHER; note R-N-(1,3-dimethylimidazolidin-2-ylidene)phosphoramidate
  modified_base 2: mod_base = um
  modified_base 2..3: mod_base = OTHER; note = S-phosphorothioate
  modified_base 3: mod_base = OTHER; note = 2-O-methylribose adenine
  modified_base 3..4: mod_base = OTHER; note = S-phosphorothioate
  modified_base 4: mod_base = OTHER; note = 2-fluororibose adenine
  modified_base 4..5: mod_base = OTHER; note = S-phosphorothioate
  modified_base 5: mod_base = OTHER; note = 2-fluororibose uracil
  modified_base 5..6: mod_base = OTHER; note = S-phosphorothioate
  modified_base 6: mod_base = OTHER; note = 2-fluororibose cytosine
  modified_base 6..7: mod_base = OTHER; note = S-phosphorothioate
  modified_base 7: mod_base = OTHER; note = 2-fluororibose cytosine
  modified_base 7..8: mod_base = OTHER; note = S-phosphorothioate
  modified_base 8: mod_base = OTHER; note = 2-fluororibose adenine
  modified_base 8..9: mod_base = OTHER; note = S-phosphorothioate
  modified_base 9: mod_base = OTHER; note = 2-fluororibose uracil
  modified_base 9..10: mod_base = OTHER; note = S-phosphorothioate
  modified_base 10: mod_base = OTHER; note = 2-fluororibose cytosine
  modified_base 10..11: mod_base = OTHER; note = S-phosphorothioate
  modified_base 11: mod_base = OTHER; note = 2-fluororibose uracil
  modified_base 11..12: mod_base = OTHER; note = S-phosphorothioate
  modified_base 12: mod_base = OTHER; note = 2-fluororibose cytosine
  modified_base 12..13: mod_base = OTHER; note = S-phosphorothioate
  modified_base 13: mod_base = OTHER; note = 2-fluororibose uracil
  modified_base 13..14: mod_base = OTHER; note = S-phosphorothioate
  modified_base 14: mod_base = OTHER; note = 2-fluororibose uracil
  modified_base 14..15: mod_base = OTHER; note = S-phosphorothioate
  modified_base 15: mod_base = OTHER; note = 2-fluororibose cytosine
  modified_base 15..16: mod_base = OTHER; note = S-phosphorothioate
  modified_base 16: mod_base = OTHER; note = 2-fluororibose adenine
  modified_base 16..17: mod_base = OTHER; note = S-phosphorothioate
  modified_base 17: mod_base = OTHER; note = 2-fluororibose guanine
  modified_base 17..18: mod_base = OTHER; note = S-phosphorothioate
  modified_base 18: mod_base = OTHER; note = 2-fluororibose adenine
  modified_base 18..19: mod_base = OTHER; note = S-phosphorothioate
  modified_base 19: mod_base = OTHER; note = 2-fluororibose uracil
  modified_base 19..20: mod_base = OTHER; note = S-phosphorothioate
  modified_base 20: mod_base = OTHER; note = 2-fluororibose adenine
  modified_base 20..21: mod_base = OTHER; note = S-phosphorothioate
  modified_base 21: mod_base = OTHER; note = 2-fluororibose uracil
  modified_base 21..22: mod_base = OTHER; note = S-phosphorothioate
  modified_base 22: mod_base = OTHER; note = 2-fluororibose guanine
  modified_base 22..23: mod_base = OTHER; note = S-phosphorothioate
  modified_base 23: mod_base = OTHER; note = 2-fluororibose uracil
  modified_base 23..24: mod_base = OTHER; note = S-phosphorothioate
  modified_base 24: mod_base = OTHER; note = 2-fluororibose cytosine
  modified_base 24..25: mod_base = OTHER; note = S-phosphorothioate
  modified_base 25: mod_base = OTHER; note = deoxyribose cytosine
  modified_base 25..26: mod_base = OTHER; note = S-phosphorothioate
  modified_base 26: mod_base = OTHER; note = deoxyribose adenine
  modified_base 26..27: mod_base = OTHER; note R-N-(1,3-dimethylimidazolidin-2-ylidene)phosphoramidate
  modified_base 27: mod_base = cm
  modified_base 27..28: mod_base = OTHER; note = S-phosphorothioate
  modified_base 28: mod_base = OTHER; note = 2-fluororibose adenine
  modified_base 28..29: mod_base = OTHER; note = S-phosphorothioate
  modified_base 29: mod_base = gm
  modified_base 29..30: mod_base = OTHER; note R-N-(1,3-dimethylimidazolidin-2-ylidene)phosphoramidate
  modified_base 30: mod_base = OTHER; note = 2-O-methylribose adenine
  source 1..30: mol_type = other RNA

SEQ ID NO: 686 - RNA, 30 nt, synthetic construct; identical to SEQ ID NO: 684
  misc_feature 1..30: note = Synthetic: WV-47064
  misc_feature 1..30: note = Synthetic: ADR-0102432
  modified_base 1: mod_base = um
  modified_base 1..2: mod_base = OTHER; note R-N-(1,3-dimethylimidazolidin-2-ylidene)phosphoramidate
  modified_base 2: mod_base = um
  modified_base 2..3: mod_base = OTHER; note = S-phosphorothioate
  modified_base 3: mod_base = OTHER; note = 2-O-methylribose adenine
  modified_base 3..4: mod_base = OTHER; note = S-phosphorothioate
  modified_base 4: mod_base = OTHER; note = 2-fluororibose adenine
  modified_base 4..5: mod_base = OTHER; note = S-phosphorothioate
  modified_base 5: mod_base = OTHER; note = 2-fluororibose uracil
  modified_base 5..6: mod_base = OTHER; note = S-phosphorothioate
  modified_base 6: mod_base = OTHER; note = 2-fluororibose cytosine
  modified_base 6..7: mod_base = OTHER; note = S-phosphorothioate
  modified_base 7: mod_base = OTHER; note = 2-fluororibose cytosine
  modified_base 7..8: mod_base = OTHER; note = S-phosphorothioate
  modified_base 8: mod_base = OTHER; note = 2-fluororibose adenine
  modified_base 8..9: mod_base = OTHER; note = S-phosphorothioate
  modified_base 9: mod_base = OTHER; note = 2-fluororibose uracil
  modified_base 9..10: mod_base = OTHER; note = S-phosphorothioate
  modified_base 10: mod_base = OTHER; note = 2-fluororibose cytosine
  modified_base 10..11: mod_base = OTHER; note = S-phosphorothioate
  modified_base 11: mod_base = OTHER; note = 2-fluororibose uracil
  modified_base 11..12: mod_base = OTHER; note = S-phosphorothioate
  modified_base 12: mod_base = OTHER; note = 2-fluororibose cytosine
  modified_base 12..13: mod_base = OTHER; note = S-phosphorothioate
  modified_base 13: mod_base = OTHER; note = 2-fluororibose uracil
  modified_base 13..14: mod_base = OTHER; note = S-phosphorothioate
  modified_base 14: mod_base = OTHER; note = 2-fluororibose uracil
  modified_base 14..15: mod_base = OTHER; note = S-phosphorothioate
  modified_base 15: mod_base = OTHER; note = 2-fluororibose cytosine
  modified_base 15..16: mod_base = OTHER; note = S-phosphorothioate
  modified_base 16: mod_base = OTHER; note = 2-fluororibose adenine
  modified_base 16..17: mod_base = OTHER; note = S-phosphorothioate
  modified_base 17: mod_base = OTHER; note = 2-fluororibose guanine
  modified_base 17..18: mod_base = OTHER; note = S-phosphorothioate
  modified_base 18: mod_base = OTHER; note = 2-fluororibose adenine
  modified_base 18..19: mod_base = OTHER; note = S-phosphorothioate
  modified_base 19: mod_base = OTHER; note = 2-fluororibose uracil
  modified_base 19..20: mod_base = OTHER; note = S-phosphorothioate
  modified_base 20: mod_base = OTHER; note = 2-fluororibose adenine
  modified_base 20..21: mod_base = OTHER; note = S-phosphorothioate
  modified_base 21: mod_base = OTHER; note = 2-fluororibose uracil
  modified_base 21..22: mod_base = OTHER; note = S-phosphorothioate
  modified_base 22: mod_base = OTHER; note = 2-fluororibose guanine
  modified_base 22..23: mod_base = OTHER; note = S-phosphorothioate
  modified_base 23: mod_base = OTHER; note = 2-fluororibose uracil
  modified_base 23..24: mod_base = OTHER; note = S-phosphorothioate
  modified_base 24: mod_base = OTHER; note = 2-fluororibose cytosine
  modified_base 24..25: mod_base = OTHER; note = S-phosphorothioate
  modified_base 25: mod_base = OTHER; note = deoxyribose cytosine
  modified_base 25..26: mod_base = OTHER; note = S-phosphorothioate
  modified_base 26: mod_base = OTHER; note = deoxyribose adenine
  modified_base 26..27: mod_base = OTHER; note R-N-(1,3-dimethylimidazolidin-2-ylidene)phosphoramidate
  modified_base 27: mod_base = cm
  modified_base 27..28: mod_base = OTHER; note = S-phosphorothioate
  modified_base 28: mod_base = OTHER; note = 2-O-methylribose adenine
  modified_base 28..29: mod_base = OTHER; note = S-phosphorothioate
  modified_base 29: mod_base = gm
  modified_base 29..30: mod_base = OTHER; note R-N-(1,3-dimethylimidazolidin-2-ylidene)phosphoramidate
  modified_base 30: mod_base = OTHER; note = 2-O-methylribose adenine
  source 1..30: mol_type = other RNA

SEQ ID NO: 687 - RNA, 30 nt, synthetic construct
  misc_feature 1..30: note = Synthetic: WV-48183
  misc_feature 1..30: note = Synthetic: ADR-0102434
  modified_base 1: mod_base = um
  modified_base 1..2: mod_base = OTHER; note R-N-(1,3-dimethylimidazolidin-2-ylidene)phosphoramidate
  modified_base 2: mod_base = um
  modified_base 2..3: mod_base = OTHER; note = S-phosphorothioate
  modified_base 3: mod_base = OTHER; note = 2-O-methylribose adenine
  modified_base 3..4: mod_base = OTHER; note = S-phosphorothioate
  modified_base 4: mod_base = OTHER; note = 2-fluororibose adenine
  modified_base 4..5: mod_base = OTHER; note = S-phosphorothioate
  modified_base 5: mod_base = OTHER; note = 2-fluororibose uracil
  modified_base 5..6: mod_base = OTHER; note = S-phosphorothioate
  modified_base 6: mod_base = OTHER; note = 2-fluororibose cytosine
  modified_base 6..7: mod_base = OTHER; note = S-phosphorothioate
  modified_base 7: mod_base = OTHER; note = 2-fluororibose cytosine
  modified_base 7..8: mod_base = OTHER; note = S-phosphorothioate
  modified_base 8: mod_base = OTHER; note = 2-fluororibose adenine
  modified_base 8..9: mod_base = OTHER; note = S-phosphorothioate
  modified_base 9: mod_base = OTHER; note = 2-fluororibose uracil
  modified_base 9..10: mod_base = OTHER; note = S-phosphorothioate
  modified_base 10: mod_base = OTHER; note = 2-fluororibose cytosine
  modified_base 10..11: mod_base = OTHER; note = S-phosphorothioate
  modified_base 11: mod_base = OTHER; note = 2-fluororibose uracil
  modified_base 11..12: mod_base = OTHER; note = S-phosphorothioate
  modified_base 12: mod_base = OTHER; note = 2-fluororibose cytosine
  modified_base 12..13: mod_base = OTHER; note = S-phosphorothioate
  modified_base 13: mod_base = OTHER; note = 2-fluororibose uracil
  modified_base 13..14: mod_base = OTHER; note = S-phosphorothioate
  modified_base 14: mod_base = OTHER; note = 2-fluororibose uracil
  modified_base 14..15: mod_base = OTHER; note = S-phosphorothioate
  modified_base 15: mod_base = OTHER; note = 2-fluororibose cytosine
  modified_base 15..16: mod_base = OTHER; note = S-phosphorothioate
  modified_base 16: mod_base = OTHER; note = 2-fluororibose adenine
  modified_base 16..17: mod_base = OTHER; note = S-phosphorothioate
  modified_base 17: mod_base = OTHER; note = 2-fluororibose guanine
  modified_base 17..18: mod_base = OTHER; note = S-phosphorothioate
  modified_base 18: mod_base = OTHER; note = 2-fluororibose adenine
  modified_base 18..19: mod_base = OTHER; note = S-phosphorothioate
  modified_base 19: mod_base = OTHER; note = 2-fluororibose uracil
  modified_base 19..20: mod_base = OTHER; note = S-phosphorothioate
  modified_base 20: mod_base = OTHER; note = 2-fluororibose adenine
  modified_base 20..21: mod_base = OTHER; note = S-phosphorothioate
  modified_base 21: mod_base = OTHER; note = 2-fluororibose uracil
  modified_base 21..22: mod_base = OTHER; note = S-phosphorothioate
  modified_base 22: mod_base = OTHER; note = 2-fluororibose guanine
  modified_base 22..23: mod_base = OTHER; note = S-phosphorothioate
  modified_base 23: mod_base = OTHER; note = 2-fluororibose uracil
  modified_base 23..24: mod_base = OTHER; note = S-phosphorothioate
  modified_base 24: mod_base = OTHER; note = 2-fluororibose cytosine
  modified_base 24..25: mod_base = OTHER; note = S-phosphorothioate
  modified_base 25: mod_base = OTHER; note = deoxyribose 6-amino-9-substituted 8,9-dihydro-7H-purin-8-one
  modified_base 25..26: mod_base = OTHER; note = S-phosphorothioate
  modified_base 26: mod_base = OTHER; note = deoxyribose adenine
  modified_base 26..27: mod_base = OTHER; note R-N-(1,3-dimethylimidazolidin-2-ylidene)phosphoramidate
  modified_base 27: mod_base = cm
  modified_base 27..28: mod_base = OTHER; note = S-phosphorothioate
  modified_base 28: mod_base = OTHER; note = 2-fluororibose adenine
  modified_base 28..29: mod_base = OTHER; note = S-phosphorothioate
  modified_base 29: mod_base = gm
  modified_base 29..30: mod_base = OTHER; note R-N-(1,3-dimethylimidazolidin-2-ylidene)phosphoramidate
  modified_base 30: mod_base = OTHER; note = 2-O-methylribose adenine
  source 1..30: mol_type = other RNA
ttaatccatctcttcagatatgtcaacaga

SEQ ID NO: 688 - RNA, 30 nt, synthetic construct
  misc_feature 1..30: note = Synthetic: WV-48184
  misc_feature 1..30: note = Synthetic: ADR-0102433
  modified_base 1: mod_base = um
  modified_base 1..2: mod_base = OTHER; note R-N-(1,3-dimethylimidazolidin-2-ylidene)phosphoramidate
  modified_base 2: mod_base = um
  modified_base 2..3: mod_base = OTHER; note = S-phosphorothioate
  modified_base 3: mod_base = OTHER; note = 2-O-methylribose adenine
  modified_base 3..4: mod_base = OTHER; note = S-phosphorothioate
  modified_base 4: mod_base = OTHER; note = 2-fluororibose adenine
  modified_base 4..5: mod_base = OTHER; note = S-phosphorothioate
  modified_base 5: mod_base = OTHER; note = 2-fluororibose uracil
  modified_base 5..6: mod_base = OTHER; note = S-phosphorothioate
  modified_base 6: mod_base = OTHER; note = 2-fluororibose cytosine
  modified_base 6..7: mod_base = OTHER; note = S-phosphorothioate
  modified_base 7: mod_base = OTHER; note = 2-fluororibose cytosine
  modified_base 7..8: mod_base = OTHER; note = S-phosphorothioate
  modified_base 8: mod_base = OTHER; note = 2-fluororibose adenine
  modified_base 8..9: mod_base = OTHER; note = S-phosphorothioate
  modified_base 9: mod_base = OTHER; note = 2-fluororibose uracil
  modified_base 9..10: mod_base = OTHER; note = S-phosphorothioate
  modified_base 10: mod_base = OTHER; note = 2-fluororibose cytosine
  modified_base 10..11: mod_base = OTHER; note = S-phosphorothioate
  modified_base 11: mod_base = OTHER; note = 2-fluororibose uracil
  modified_base 11..12: mod_base = OTHER; note = S-phosphorothioate
  modified_base 12: mod_base = OTHER; note = 2-fluororibose cytosine
  modified_base 12..13: mod_base = OTHER; note = S-phosphorothioate
  modified_base 13: mod_base = OTHER; note = 2-fluororibose uracil
  modified_base 13..14: mod_base = OTHER; note = S-phosphorothioate
  modified_base 14: mod_base = OTHER; note = 2-fluororibose uracil
  modified_base 14..15: mod_base = OTHER; note = S-phosphorothioate
  modified_base 15: mod_base = OTHER; note = 2-fluororibose cytosine
  modified_base 15..16: mod_base = OTHER; note = S-phosphorothioate
  modified_base 16: mod_base = OTHER; note = 2-fluororibose adenine
  modified_base 16..17: mod_base = OTHER; note = S-phosphorothioate
  modified_base 17: mod_base = OTHER; note = 2-fluororibose guanine
  modified_base 17..18: mod_base = OTHER; note = S-phosphorothioate
  modified_base 18: mod_base = OTHER; note = 2-fluororibose adenine
  modified_base 18..19: mod_base = OTHER; note = S-phosphorothioate
  modified_base 19: mod_base = OTHER; note = 2-fluororibose uracil
  modified_base 19..20: mod_base = OTHER; note = S-phosphorothioate
  modified_base 20: mod_base = OTHER; note = 2-fluororibose adenine
  modified_base 20..21: mod_base = OTHER; note = S-phosphorothioate
  modified_base 21: mod_base = OTHER; note = 2-fluororibose uracil
  modified_base 21..22: mod_base = OTHER; note = S-phosphorothioate
  modified_base 22: mod_base = OTHER; note = 2-fluororibose guanine
  modified_base 22..23: mod_base = OTHER; note = S-phosphorothioate
  modified_base 23: mod_base = OTHER; note = 2-fluororibose uracil
  modified_base 23..24: mod_base = OTHER; note = S-phosphorothioate
  modified_base 24: mod_base = OTHER; note = 2-fluororibose cytosine
  modified_base 24..25: mod_base = OTHER; note = S-phosphorothioate
  modified_base 25: mod_base = OTHER; note = deoxyribose uracil (position 3 connectivity)
  modified_base 25..26: mod_base = OTHER; note = S-phosphorothioate
  modified_base 26: mod_base = OTHER; note = deoxyribose adenine
  modified_base 26..27: mod_base = OTHER; note R-N-(1,3-dimethylimidazolidin-2-ylidene)phosphoramidate
  modified_base 27: mod_base = cm
  modified_base 27..28: mod_base = OTHER; note = S-phosphorothioate
  modified_base 28: mod_base = OTHER; note = 2-fluororibose adenine
  modified_base 28..29: mod_base = OTHER; note = S-phosphorothioate
  modified_base 29: mod_base = gm
  modified_base 29..30: mod_base = OTHER; note R-N-(1,3-dimethylimidazolidin-2-ylidene)phosphoramidate
  modified_base 30: mod_base = OTHER; note = 2-O-methylribose adenine
  source 1..30: mol_type = other RNA
ttaatccatctcttcagatatgtctacaga

SEQ ID NO: 689 - RNA, 30 nt, synthetic construct; identical to SEQ ID NO: 684
  misc_feature 1..30: note = Synthetic: WV-48185
  misc_feature 1..30: note = Synthetic: ADR-0102435
  modified_base 1: mod_base = um
  modified_base 1..2: mod_base = OTHER; note R-N-(1,3-dimethylimidazolidin-2-ylidene)phosphoramidate
  modified_base 2: mod_base = um
  modified_base 2..3: mod_base = OTHER; note = S-phosphorothioate
  modified_base 3: mod_base = OTHER; note = 2-O-methylribose adenine
  modified_base 3..4: mod_base = OTHER; note = S-phosphorothioate
  modified_base 4: mod_base = OTHER; note = 2-fluororibose adenine
  modified_base 4..5: mod_base = OTHER; note = S-phosphorothioate
  modified_base 5: mod_base = OTHER; note = 2-fluororibose uracil
  modified_base 5..6: mod_base = OTHER; note = S-phosphorothioate
  modified_base 6: mod_base = OTHER; note = 2-fluororibose cytosine
  modified_base 6..7: mod_base = OTHER; note = S-phosphorothioate
  modified_base 7: mod_base = OTHER; note = 2-fluororibose cytosine
  modified_base 7..8: mod_base = OTHER; note = S-phosphorothioate
  modified_base 8: mod_base = OTHER; note = 2-fluororibose adenine
  modified_base 8..9: mod_base = OTHER; note = S-phosphorothioate
  modified_base 9: mod_base = OTHER; note = 2-fluororibose uracil
  modified_base 9..10: mod_base = OTHER; note = S-phosphorothioate
  modified_base 10: mod_base = OTHER; note = 2-fluororibose cytosine
  modified_base 10..11: mod_base = OTHER; note = S-phosphorothioate
  modified_base 11: mod_base = OTHER; note = 2-fluororibose uracil
  modified_base 11..12: mod_base = OTHER; note = S-phosphorothioate
  modified_base 12: mod_base = OTHER; note = 2-fluororibose cytosine
  modified_base 12..13: mod_base = OTHER; note = S-phosphorothioate
  modified_base 13: mod_base = OTHER; note = 2-fluororibose uracil
  modified_base 13..14: mod_base = OTHER; note = S-phosphorothioate
  modified_base 14: mod_base = OTHER; note = 2-fluororibose uracil
  modified_base 14..15: mod_base = OTHER; note = S-phosphorothioate
  modified_base 15: mod_base = OTHER; note = 2-fluororibose cytosine
  modified_base 15..16: mod_base = OTHER; note = S-phosphorothioate
  modified_base 16: mod_base = OTHER; note = 2-fluororibose adenine
  modified_base 16..17: mod_base = OTHER; note = S-phosphorothioate
  modified_base 17: mod_base = OTHER; note = 2-fluororibose guanine
  modified_base 17..18: mod_base = OTHER; note = S-phosphorothioate
  modified_base 18: mod_base = OTHER; note = 2-fluororibose adenine
  modified_base 18..19: mod_base = OTHER; note = S-phosphorothioate
  modified_base 19: mod_base = OTHER; note = 2-fluororibose uracil
  modified_base 19..20: mod_base = OTHER; note = S-phosphorothioate
  modified_base 20: mod_base = OTHER; note = 2-fluororibose adenine
  modified_base 20..21: mod_base = OTHER; note = S-phosphorothioate
  modified_base 21: mod_base = OTHER; note = 2-fluororibose uracil
  modified_base 21..22: mod_base = OTHER; note = S-phosphorothioate
  modified_base 22: mod_base = OTHER; note = 2-fluororibose guanine
  modified_base 22..23: mod_base = OTHER; note = S-phosphorothioate
  modified_base 23: mod_base = OTHER; note = 2-fluororibose uracil
  modified_base 23..24: mod_base = OTHER; note = S-phosphorothioate
  modified_base 24: mod_base = OTHER; note = deoxyribose cytosine
  modified_base 24..25: mod_base = OTHER; note = S-phosphorothioate
  modified_base 25: mod_base = OTHER; note = deoxyribose cytosine
  modified_base 25..26: mod_base = OTHER; note = S-phosphorothioate
  modified_base 26: mod_base = OTHER; note = deoxyribose adenine
  modified_base 26..27: mod_base = OTHER; note R-N-(1,3-dimethylimidazolidin-2-ylidene)phosphoramidate
  modified_base 27: mod_base = cm
  modified_base 27..28: mod_base = OTHER; note = S-phosphorothioate
  modified_base 28: mod_base = OTHER; note = 2-fluororibose adenine
  modified_base 28..29: mod_base = OTHER; note = S-phosphorothioate
  modified_base 29: mod_base = gm
  modified_base 29..30: mod_base = OTHER; note R-N-(1,3-dimethylimidazolidin-2-ylidene)phosphoramidate
  modified_base 30: mod_base = OTHER; note = 2-O-methylribose adenine
  source 1..30: mol_type = other RNA

SEQ ID NO: 690 - RNA, 30 nt, synthetic construct
  misc_feature 1..30: note = Synthetic: WV-44548
  misc_feature 1..30: note = Synthetic: ADR-0102270
  modified_base 1: mod_base = OTHER; note = 2-fluororibose cytosine
  modified_base 1..2: mod_base = OTHER; note R-N-(1,3-dimethylimidazolidin-2-ylidene)phosphoramidate
  modified_base 2: mod_base = OTHER; note = 2-fluororibose adenine
  modified_base 2..3: mod_base = OTHER; note = S-phosphorothioate
  modified_base 3: mod_base = OTHER; note = 2-fluororibose adenine
  modified_base 3..4: mod_base = OTHER; note = S-phosphorothioate
  modified_base 4: mod_base = OTHER; note = 2-fluororibose cytosine
  modified_base 4..5: mod_base = OTHER; note = S-phosphorothioate
  modified_base 5: mod_base = OTHER; note = 2-fluororibose cytosine
  modified_base 5..6: mod_base = OTHER; note = S-phosphorothioate
  modified_base 6: mod_base = OTHER; note = 2-fluororibose adenine
  modified_base 6..7: mod_base = OTHER; note = S-phosphorothioate
  modified_base 7: mod_base = OTHER; note = 2-fluororibose guanine
  modified_base 7..8: mod_base = OTHER; note = S-phosphorothioate
  modified_base 8: mod_base = OTHER; note = 2-fluororibose adenine
  modified_base 8..9: mod_base = OTHER; note = S-phosphorothioate
  modified_base 9: mod_base = OTHER; note = 2-fluororibose adenine
  modified_base 9..10: mod_base = OTHER; note = S-phosphorothioate
  modified_base 10: mod_base = OTHER; note = 2-fluororibose adenine
  modified_base 10..11: mod_base = OTHER; note = S-phosphorothioate
  modified_base 11: mod_base = OTHER; note = 2-fluororibose uracil
  modified_base 11..12: mod_base = OTHER; note = S-phosphorothioate
  modified_base 12: mod_base = OTHER; note = 2-fluororibose uracil
  modified_base 12..13: mod_base = OTHER; note = S-phosphorothioate
  modified_base 13: mod_base = OTHER; note = 2-fluororibose guanine
  modified_base 13..14: mod_base = OTHER; note = S-phosphorothioate
  modified_base 14: mod_base = OTHER; note = 2-fluororibose guanine
  modified_base 14..15: mod_base = OTHER; note = S-phosphorothioate
  modified_base 15: mod_base = OTHER; note = 2-fluororibose cytosine
  modified_base 15..16: mod_base = OTHER; note = S-phosphorothioate
  modified_base 16: mod_base = OTHER; note = 2-O-methylribose adenine
  modified_base 16..17: mod_base = OTHER; note = S-phosphorothioate
  modified_base 17: mod_base = cm
  modified_base 17..18: mod_base = OTHER; note = S-phosphorothioate
  modified_base 18: mod_base = OTHER; note = 2-O-methylribose adenine
  modified_base 18..19: mod_base = OTHER; note = S-phosphorothioate
  modified_base 19: mod_base = OTHER; note = 2-O-methylribose adenine
  modified_base 19..20: mod_base = OTHER; note = S-phosphorothioate
  modified_base 20: mod_base = OTHER; note = 2-O-methylribose adenine
  modified_base 20..21: mod_base = OTHER; note = S-phosphorothioate
  modified_base 21: mod_base = um
  modified_base 21..22: mod_base = OTHER; note = S-phosphorothioate
  modified_base 22: mod_base = gm
  modified_base 22..23: mod_base = OTHER; note = S-phosphorothioate
  modified_base 23: mod_base = OTHER; note = 2-fluororibose cytosine
  modified_base 23..24: mod_base = OTHER; note = S-phosphorothioate
  modified_base 24: mod_base = OTHER; note = deoxyribose cytosine
  modified_base 24..25: mod_base = OTHER; note = S-phosphorothioate
  modified_base 25: mod_base = OTHER; note = deoxyribose adenine
  modified_base 25..26: mod_base = OTHER; note R-N-(1,3-dimethylimidazolidin-2-ylidene)phosphoramidate
  modified_base 26: mod_base = cm
  modified_base 26..27: mod_base = OTHER; note = S-phosphorothioate
  modified_base 27: mod_base = um
  modified_base 27..28: mod_base = OTHER; note = S-phosphorothioate
  modified_base 28: mod_base = gm
  modified_base 28..29: mod_base = OTHER; note = S-phosphorothioate
  modified_base 29: mod_base = um
  modified_base 29..30: mod_base = OTHER; note R-N-(1,3-dimethylimidazolidin-2-ylidene)phosphoramidate
  modified_base 30: mod_base = gm
  source 1..30: mol_type = other RNA
caaccagaaattggcacaaatgccactgtg

SEQ ID NO: 691 - RNA, 30 nt, synthetic construct; identical to SEQ ID NO: 690
  misc_feature 1..30: note = Synthetic: WV-44549
  misc_feature 1..30: note = Synthetic: ADR-0102272
  modified_base 1: mod_base = cm
  modified_base 1..2: mod_base = OTHER; note R-N-(1,3-dimethylimidazolidin-2-ylidene)phosphoramidate
  modified_base 2: mod_base = OTHER; note = 2-O-methylribose adenine
  modified_base 2..3: mod_base = OTHER; note = S-phosphorothioate
  modified_base 3: mod_base = OTHER; note = 2-O-methylribose adenine
  modified_base 3..4: mod_base = OTHER; note = S-phosphorothioate
  modified_base 4: mod_base = OTHER; note = 2-fluororibose cytosine
  modified_base 4..5: mod_base = OTHER; note = S-phosphorothioate
  modified_base 5: mod_base = OTHER; note = 2-fluororibose cytosine
  modified_base 5..6: mod_base = OTHER; note = S-phosphorothioate
  modified_base 6: mod_base = OTHER; note = 2-fluororibose adenine
  modified_base 6..7: mod_base = OTHER; note = S-phosphorothioate
  modified_base 7: mod_base = OTHER; note = 2-fluororibose guanine
  modified_base 7..8: mod_base = OTHER; note = S-phosphorothioate
  modified_base 8: mod_base = OTHER; note = 2-fluororibose adenine
  modified_base 8..9: mod_base = OTHER; note = S-phosphorothioate
  modified_base 9: mod_base = OTHER; note = 2-fluororibose adenine
  modified_base 9..10: mod_base = OTHER; note = S-phosphorothioate
  modified_base 10: mod_base = OTHER; note = 2-fluororibose adenine
  modified_base 10..11: mod_base = OTHER; note = S-phosphorothioate
  modified_base 11: mod_base = OTHER; note = 2-fluororibose uracil
  modified_base 11..12: mod_base = OTHER; note = S-phosphorothioate
  modified_base 12: mod_base = OTHER; note = 2-fluororibose uracil
  modified_base 12..13: mod_base = OTHER; note = S-phosphorothioate
  modified_base 13: mod_base = OTHER; note = 2-fluororibose guanine
  modified_base 13..14: mod_base = OTHER; note = S-phosphorothioate
  modified_base 14: mod_base = OTHER; note = 2-fluororibose guanine
  modified_base 14..15: mod_base = OTHER; note = S-phosphorothioate
  modified_base 15: mod_base = OTHER; note = 2-fluororibose cytosine
  modified_base 15..16: mod_base = OTHER; note = S-phosphorothioate
  modified_base 16: mod_base = OTHER; note = 2-fluororibose adenine
  modified_base 16..17: mod_base = OTHER; note = S-phosphorothioate
  modified_base 17: mod_base = OTHER; note = 2-fluororibose cytosine
  modified_base 17..18: mod_base = OTHER; note = S-phosphorothioate
  modified_base 18: mod_base = OTHER; note = 2-fluororibose adenine
  modified_base 18..19: mod_base = OTHER; note = S-phosphorothioate
  modified_base 19: mod_base = OTHER; note = 2-fluororibose adenine
  modified_base 19..20: mod_base = OTHER; note = S-phosphorothioate
  modified_base 20: mod_base = OTHER; note = 2-fluororibose adenine
  modified_base 20..21: mod_base = OTHER; note = S-phosphorothioate
  modified_base 21: mod_base = OTHER; note = 2-fluororibose uracil
  modified_base 21..22: mod_base = OTHER; note = S-phosphorothioate
  modified_base 22: mod_base = OTHER; note = 2-fluororibose guanine
  modified_base 22..23: mod_base = OTHER; note = S-phosphorothioate
  modified_base 23: mod_base = OTHER; note = 2-fluororibose cytosine
  modified_base 23..24: mod_base = OTHER; note = S-phosphorothioate
  modified_base 24: mod_base = OTHER; note = deoxyribose cytosine
  modified_base 24..25: mod_base = OTHER; note = S-phosphorothioate
  modified_base 25: mod_base = OTHER; note = deoxyribose adenine
  modified_base 25..26: mod_base = OTHER; note R-N-(1,3-dimethylimidazolidin-2-ylidene)phosphoramidate
  modified_base 26: mod_base = cm
  modified_base 26..27: mod_base = OTHER; note = S-phosphorothioate
  modified_base 27: mod_base = OTHER; note = 2-fluororibose uracil
  modified_base 27..28: mod_base = OTHER; note = S-phosphorothioate
  modified_base 28: mod_base = gm
  modified_base 28..29: mod_base = OTHER; note = S-phosphorothioate
  modified_base 29: mod_base = um
  modified_base 29..30: mod_base = OTHER; note R-N-(1,3-dimethylimidazolidin-2-ylidene)phosphoramidate
  modified_base 30: mod_base = gm
  source 1..30: mol_type = other RNA

SEQ ID NO: 692 - RNA, 30 nt, synthetic construct
  misc_feature 1..30: note = Synthetic: WV-44550
  misc_feature 1..30: note = Synthetic: ADR-0102273
  modified_base 1: mod_base = cm
  modified_base 1..2: mod_base = OTHER; note R-N-(1,3-dimethylimidazolidin-2-ylidene)phosphoramidate
  modified_base 2: mod_base = OTHER; note = 2-O-methylribose adenine
  modified_base 2..3: mod_base = OTHER; note = S-phosphorothioate
  modified_base 3: mod_base = OTHER; note = 2-O-methylribose adenine
  modified_base 3..4: mod_base = OTHER; note = S-phosphorothioate
  modified_base 4: mod_base = OTHER; note = 2-fluororibose cytosine
  modified_base 4..5: mod_base = OTHER; note = S-phosphorothioate
  modified_base 5: mod_base = OTHER; note = 2-fluororibose cytosine
  modified_base 5..6: mod_base = OTHER; note = S-phosphorothioate
  modified_base 6: mod_base = OTHER; note = 2-fluororibose adenine
  modified_base 6..7: mod_base = OTHER; note = S-phosphorothioate
  modified_base 7: mod_base = OTHER; note = 2-fluororibose guanine
  modified_base 7..8: mod_base = OTHER; note = S-phosphorothioate
  modified_base 8: mod_base = OTHER; note = 2-fluororibose adenine
  modified_base 8..9: mod_base = OTHER; note = S-phosphorothioate
  modified_base 9: mod_base = OTHER; note = 2-fluororibose adenine
  modified_base 9..10: mod_base = OTHER; note = S-phosphorothioate
  modified_base 10: mod_base = OTHER; note = 2-fluororibose adenine
  modified_base 10..11: mod_base = OTHER; note = S-phosphorothioate
  modified_base 11: mod_base = OTHER; note = 2-fluororibose uracil
  modified_base 11..12: mod_base = OTHER; note = S-phosphorothioate
  modified_base 12: mod_base = OTHER; note = 2-fluororibose uracil
  modified_base 12..13: mod_base = OTHER; note = S-phosphorothioate
  modified_base 13: mod_base = OTHER; note = 2-fluororibose guanine
  modified_base 13..14: mod_base = OTHER; note = S-phosphorothioate
  modified_base 14: mod_base = OTHER; note = 2-fluororibose guanine
  modified_base 14..15: mod_base = OTHER; note = S-phosphorothioate
  modified_base 15: mod_base = OTHER; note = 2-fluororibose cytosine
  modified_base 15..16: mod_base = OTHER; note = S-phosphorothioate
  modified_base 16: mod_base = OTHER; note = 2-fluororibose adenine
  modified_base 16..17: mod_base = OTHER; note = S-phosphorothioate
  modified_base 17: mod_base = OTHER; note = 2-fluororibose cytosine
  modified_base 17..18: mod_base = OTHER; note = S-phosphorothioate
  modified_base 18: mod_base = OTHER; note = 2-fluororibose adenine
  modified_base 18..19: mod_base = OTHER; note = S-phosphorothioate
  modified_base 19: mod_base = OTHER; note = 2-fluororibose adenine
  modified_base 19..20: mod_base = OTHER; note = S-phosphorothioate
  modified_base 20: mod_base = OTHER; note = 2-fluororibose adenine
  modified_base 20..21: mod_base = OTHER; note = S-phosphorothioate
  modified_base 21: mod_base = OTHER; note = 2-fluororibose uracil
  modified_base 21..22: mod_base = OTHER; note = S-phosphorothioate
  modified_base 22: mod_base = OTHER; note = 2-fluororibose guanine
  modified_base 22..23: mod_base = OTHER; note = S-phosphorothioate
  modified_base 23: mod_base = OTHER; note = 2-fluororibose cytosine
  modified_base 23..24: mod_base = OTHER; note = S-phosphorothioate
  modified_base 24: mod_base = OTHER; note = deoxyribose uracil (position 3 connectivity)
  modified_base 24..25: mod_base = OTHER; note = S-phosphorothioate
  modified_base 25: mod_base = OTHER; note = deoxyribose adenine
  modified_base 25..26: mod_base = OTHER; note R-N-(1,3-dimethylimidazolidin-2-ylidene)phosphoramidate
  modified_base 26: mod_base = cm
  modified_base 26..27: mod_base = OTHER; note = S-phosphorothioate
  modified_base 27: mod_base = OTHER; note = 2-fluororibose uracil
  modified_base 27..28: mod_base = OTHER; note = S-phosphorothioate
  modified_base 28: mod_base = gm
  modified_base 28..29: mod_base = OTHER; note = S-phosphorothioate
  modified_base 29: mod_base = um
  modified_base 29..30: mod_base = OTHER; note R-N-(1,3-dimethylimidazolidin-2-ylidene)phosphoramidate
  modified_base 30: mod_base = gm
  source 1..30: mol_type = other RNA
caaccagaaattggcacaaatgctactgtg

SEQ ID NO: 693 - RNA, 30 nt, synthetic construct; identical to SEQ ID NO: 1
  misc_feature 1..30: note = Synthetic: WV-44002
  misc_feature 1..30: note = Synthetic: ADR-0100511
  modified_base 1: mod_base = OTHER; note = triantennary GalNAc with C12 linker linked to 6-aminohexanol linked by phosphate to the 5' end of 2-fluororibose adenine
  modified_base 1..2: mod_base = OTHER; note = S-phosphorothioate
  modified_base 2: mod_base = OTHER; note = 2-fluororibose uracil
  modified_base 2..3: mod_base = OTHER; note = S-phosphorothioate
  modified_base 3: mod_base = OTHER; note = 2-fluororibose cytosine
  modified_base 3..4: mod_base = OTHER; note R-N-(1,3-dimethylimidazolidin-2-ylidene)phosphoramidate
  modified_base 4: mod_base = OTHER; note = 2-fluororibose cytosine
  modified_base 4..5: mod_base = OTHER; note = S-phosphorothioate
  modified_base 5: mod_base = OTHER; note = 2-fluororibose adenine
  modified_base 5..6: mod_base = OTHER; note = S-phosphorothioate
  modified_base 6: mod_base = OTHER; note = 2-fluororibose cytosine
  modified_base 6..7: mod_base = OTHER; note R-N-(1,3-dimethylimidazolidin-2-ylidene)phosphoramidate
  modified_base 7: mod_base = OTHER; note = 2-fluororibose uracil
  modified_base 7..8: mod_base = OTHER; note = S-phosphorothioate
  modified_base 8: mod_base = OTHER; note = 2-fluororibose guanine
  modified_base 8..9: mod_base = OTHER; note = S-phosphorothioate
  modified_base 9: mod_base = OTHER; note = 2-fluororibose uracil
  modified_base 9..10: mod_base = OTHER; note = S-phosphorothioate
  modified_base 10: mod_base = OTHER; note = 2-fluororibose guanine
  modified_base 10..11: mod_base = OTHER; note = S-phosphorothioate
  modified_base 11: mod_base = OTHER; note = 2-fluororibose guanine
  modified_base 11..12: mod_base = OTHER; note = S-phosphorothioate
  modified_base 12: mod_base = OTHER; note = 2-fluororibose cytosine
  modified_base 12..13: mod_base = OTHER; note = S-phosphorothioate
  modified_base 13: mod_base = OTHER; note = 2-fluororibose adenine
  modified_base 13..14: mod_base = OTHER; note = S-phosphorothioate
  modified_base 14: mod_base = OTHER; note = 2-fluororibose cytosine
  modified_base 14..15: mod_base = OTHER; note R-N-(1,3-dimethylimidazolidin-2-ylidene)phosphoramidate
  modified_base 15: mod_base = OTHER; note = 2-fluororibose cytosine
  modified_base 16: mod_base = cm
  modified_base 16..17: mod_base = OTHER; note = S-phosphorothioate
  modified_base 17: mod_base = OTHER; note = 2-O-methylribose adenine
  modified_base 18: mod_base = gm
  modified_base 18..19: mod_base = OTHER; note = S-phosphorothioate
  modified_base 19: mod_base = OTHER; note = 2-O-methylribose adenine
  modified_base 19..20: mod_base = OTHER; note = S-phosphorothioate
  modified_base 20: mod_base = um
  modified_base 20..21: mod_base = OTHER; note = S-phosphorothioate
  modified_base 21: mod_base = um
  modified_base 21..22: mod_base = OTHER; note = S-phosphorothioate
  modified_base 22: mod_base = OTHER; note = 2-O-methylribose adenine
  modified_base 22..23: mod_base = OTHER; note = S-phosphorothioate
  modified_base 23: mod_base = um
  modified_base 23..24: mod_base = OTHER; note = S-phosphorothioate
  modified_base 24: mod_base = OTHER; note = 2-fluororibose cytosine
  modified_base 24..25: mod_base = OTHER; note = S-phosphorothioate
  modified_base 25: mod_base = OTHER; note = deoxyribose cytosine
  modified_base 25..26: mod_base = OTHER; note = S-phosphorothioate
  modified_base 26: mod_base = OTHER; note = deoxyribose adenine
  modified_base 26..27: mod_base = OTHER; note R-N-(1,3-dimethylimidazolidin-2-ylidene)phosphoramidate
  modified_base 27: mod_base = um
  modified_base 27..28: mod_base = OTHER; note = S-phosphorothioate
  modified_base 28: mod_base = gm
  modified_base 28..29: mod_base = OTHER; note = S-phosphorothioate
  modified_base 29: mod_base = um
  modified_base 29..30: mod_base = OTHER; note R-N-(1,3-dimethylimidazolidin-2-ylidene)phosphoramidate
  modified_base 30: mod_base = um
  source 1..30: mol_type = other RNA

SEQ ID NO: 694 - RNA, 30 nt, synthetic construct; identical to SEQ ID NO: 1
  misc_feature 1..30: note = Synthetic: WV-44003
  misc_feature 1..30: note = Synthetic: ADR-0100512
  modified_base 1: mod_base = OTHER; note = triantennary GalNAc with C12 linker linked to 6-aminohexanol linked by phosphate to the 5' end of 2-fluororibose adenine
  modified_base 1..2: mod_base = OTHER; note = S-phosphorothioate
  modified_base 2: mod_base = OTHER; note = 2-fluororibose uracil
  modified_base 2..3: mod_base = OTHER; note = S-phosphorothioate
  modified_base 3: mod_base = OTHER; note = 2-fluororibose cytosine
  modified_base 3..4: mod_base = OTHER; note R-N-(1,3-dimethylimidazolidin-2-ylidene)phosphoramidate
  modified_base 4: mod_base = OTHER; note = 2-fluororibose cytosine
  modified_base 4..5: mod_base = OTHER; note = S-phosphorothioate
  modified_base 5: mod_base = OTHER; note = 2-fluororibose adenine
  modified_base 5..6: mod_base = OTHER; note = S-phosphorothioate
  modified_base 6: mod_base = OTHER; note = 2-fluororibose cytosine
  modified_base 6..7: mod_base = OTHER; note R-N-(1,3-dimethylimidazolidin-2-ylidene)phosphoramidate
  modified_base 7: mod_base = OTHER; note = 2-fluororibose uracil
  modified_base 7..8: mod_base = OTHER; note = S-phosphorothioate
  modified_base 8: mod_base = OTHER; note = 2-fluororibose guanine
  modified_base 8..9: mod_base = OTHER; note = S-phosphorothioate
  modified_base 9: mod_base = OTHER; note = 2-fluororibose uracil
  modified_base 9..10: mod_base = OTHER; note = S-phosphorothioate
  modified_base 10: mod_base = OTHER; note = 2-fluororibose guanine
  modified_base 10..11: mod_base = OTHER; note = S-phosphorothioate
  modified_base 11: mod_base = OTHER; note = 2-fluororibose guanine
  modified_base 11..12: mod_base = OTHER; note = S-phosphorothioate
  modified_base 12: mod_base = OTHER; note = 2-fluororibose cytosine
  modified_base 12..13: mod_base = OTHER; note = S-phosphorothioate
  modified_base 13: mod_base = OTHER; note = 2-fluororibose adenine
  modified_base 13..14: mod_base = OTHER; note = S-phosphorothioate
  modified_base 14: mod_base = OTHER; note = 2-fluororibose cytosine
  modified_base 14..15: mod_base = OTHER; note R-N-(1,3-dimethylimidazolidin-2-ylidene)phosphoramidate
  modified_base 15: mod_base = OTHER; note = 2-fluororibose cytosine
  modified_base 16: mod_base = cm
  modified_base 16..17: mod_base = OTHER; note = S-phosphorothioate
  modified_base 17: mod_base = OTHER; note = 2-O-methylribose adenine
  modified_base 18: mod_base = gm
  modified_base 18..19: mod_base = OTHER; note = S-phosphorothioate
  modified_base 19: mod_base = OTHER; note = 2-O-methylribose adenine
  modified_base 20: mod_base = um
  modified_base 20..21: mod_base = OTHER; note = S-phosphorothioate
  modified_base 21: mod_base = um
  modified_base 21..22: mod_base = OTHER; note = S-phosphorothioate
  modified_base 22: mod_base = OTHER; note = 2-O-methylribose adenine
  modified_base 22..23: mod_base = OTHER; note = S-phosphorothioate
  modified_base 23: mod_base = um
  modified_base 23..24: mod_base = OTHER; note = S-phosphorothioate
  modified_base 24: mod_base = OTHER; note = 2-fluororibose cytosine
  modified_base 24..25: mod_base = OTHER; note = S-phosphorothioate
  modified_base 25: mod_base = OTHER; note = deoxyribose cytosine
  modified_base 25..26: mod_base = OTHER; note = S-phosphorothioate
  modified_base 26: mod_base = OTHER; note = deoxyribose adenine
  modified_base 26..27: mod_base = OTHER; note R-N-(1,3-dimethylimidazolidin-2-ylidene)phosphoramidate
  modified_base 27: mod_base = um
  modified_base 27..28: mod_base = OTHER; note = S-phosphorothioate
  modified_base 28: mod_base = gm
  modified_base 28..29: mod_base = OTHER; note = S-phosphorothioate
  modified_base 29: mod_base = um
  modified_base 29..30: mod_base = OTHER; note R-N-(1,3-dimethylimidazolidin-2-ylidene)phosphoramidate
  modified_base 30: mod_base = um
  source 1..30: mol_type = other RNA

SEQ ID NO: 695 - RNA, 30 nt, synthetic construct; identical to SEQ ID NO: 1
  misc_feature 1..30: note = Synthetic: WV-44004
  misc_feature 1..30: note = Synthetic: ADR-0100513
  modified_base 1: mod_base = OTHER; note = triantennary GalNAc with C12 linker linked to 6-aminohexanol linked by phosphate to the 5' end of 2-fluororibose adenine
  modified_base 1..2: mod_base = OTHER; note = S-phosphorothioate
  modified_base 2: mod_base = OTHER; note = 2-fluororibose uracil
  modified_base 2..3: mod_base = OTHER; note = S-phosphorothioate
  modified_base 3: mod_base = OTHER; note = 2-fluororibose cytosine
  modified_base 3..4: mod_base = OTHER; note R-N-(1,3-dimethylimidazolidin-2-ylidene)phosphoramidate
  modified_base 4: mod_base = OTHER; note = 2-fluororibose cytosine
  modified_base 4..5: mod_base = OTHER; note = S-phosphorothioate
  modified_base 5: mod_base = OTHER; note = 2-fluororibose adenine
  modified_base 5..6: mod_base = OTHER; note = S-phosphorothioate
  modified_base 6: mod_base = OTHER; note = 2-fluororibose cytosine
  modified_base 6..7: mod_base = OTHER; note R-N-(1,3-dimethylimidazolidin-2-ylidene)phosphoramidate
  modified_base 7: mod_base = OTHER; note = 2-fluororibose uracil
  modified_base 7..8: mod_base = OTHER; note = S-phosphorothioate
  modified_base 8: mod_base = OTHER; note = 2-fluororibose guanine
  modified_base 8..9: mod_base = OTHER; note = S-phosphorothioate
  modified_base 9: mod_base = OTHER; note = 2-fluororibose uracil
  modified_base 9..10: mod_base = OTHER; note = S-phosphorothioate
  modified_base 10: mod_base = OTHER; note = 2-fluororibose guanine
  modified_base 10..11: mod_base = OTHER; note = S-phosphorothioate
  modified_base 11: mod_base = OTHER; note = 2-fluororibose guanine
  modified_base 11..12: mod_base = OTHER; note = S-phosphorothioate
  modified_base 12: mod_base = OTHER; note = 2-fluororibose cytosine
  modified_base 12..13: mod_base = OTHER; note = S-phosphorothioate
  modified_base 13: mod_base = OTHER; note = 2-fluororibose adenine
  modified_base 13..14: mod_base = OTHER; note = S-phosphorothioate
  modified_base 14: mod_base = OTHER; note = 2-fluororibose cytosine
  modified_base 14..15: mod_base = OTHER; note R-N-(1,3-dimethylimidazolidin-2-ylidene)phosphoramidate
  modified_base 15: mod_base = OTHER; note = 2-fluororibose cytosine
  modified_base 16: mod_base = cm
  modified_base 16..17: mod_base = OTHER; note = S-phosphorothioate
  modified_base 17: mod_base = OTHER; note = 2-O-methylribose adenine
  modified_base 18: mod_base = gm
  modified_base 18..19: mod_base = OTHER; note = S-phosphorothioate
  modified_base 19: mod_base = OTHER; note = 2-O-methylribose adenine
  modified_base 20: mod_base = um
  modified_base 20..21: mod_base = OTHER; note = S-phosphorothioate
  modified_base 21: mod_base = um
  modified_base 22: mod_base = OTHER; note = 2-O-methylribose adenine
  modified_base 22..23: mod_base = OTHER; note = S-phosphorothioate
  modified_base 23: mod_base = um
  modified_base 23..24: mod_base = OTHER; note = S-phosphorothioate
  modified_base 24: mod_base = OTHER; note = 2-fluororibose cytosine
  modified_base 24..25: mod_base = OTHER; note = S-phosphorothioate
  modified_base 25: mod_base = OTHER; note = deoxyribose cytosine
  modified_base 25..26: mod_base = OTHER; note = S-phosphorothioate
  modified_base 26: mod_base = OTHER; note = deoxyribose adenine
  modified_base 26..27: mod_base = OTHER; note R-N-(1,3-dimethylimidazolidin-2-ylidene)phosphoramidate
  modified_base 27: mod_base = um
  modified_base 27..28: mod_base = OTHER; note = S-phosphorothioate
  modified_base 28: mod_base = gm
  modified_base 28..29: mod_base = OTHER; note = S-phosphorothioate
  modified_base 29: mod_base = um
  modified_base 29..30: mod_base = OTHER; note R-N-(1,3-dimethylimidazolidin-2-ylidene)phosphoramidate
  modified_base 30: mod_base = um
  source 1..30: mol_type = other RNA

SEQ ID NO: 696 - RNA, 30 nt, synthetic construct; identical to SEQ ID NO: 1
  misc_feature 1..30: note = Synthetic: WV-44005
  misc_feature 1..30: note = Synthetic: ADR-0100514
  modified_base 1: mod_base = OTHER; note = triantennary GalNAc with C12 linker linked to 6-aminohexanol linked by phosphate to the 5' end of 2-fluororibose adenine
  modified_base 1..2: mod_base = OTHER; note = S-phosphorothioate
  modified_base 2: mod_base = OTHER; note = 2-fluororibose uracil
  modified_base 2..3: mod_base = OTHER; note = S-phosphorothioate
  modified_base 3: mod_base = OTHER; note = 2-fluororibose cytosine
  modified_base 3..4: mod_base = OTHER; note R-N-(1,3-dimethylimidazolidin-2-ylidene)phosphoramidate
  modified_base 4: mod_base = OTHER; note = 2-fluororibose cytosine
  modified_base 4..5: mod_base = OTHER; note = S-phosphorothioate
  modified_base 5: mod_base = OTHER; note = 2-fluororibose adenine
  modified_base 5..6: mod_base = OTHER; note = S-phosphorothioate
  modified_base 6: mod_base = OTHER; note = 2-fluororibose cytosine
  modified_base 6..7: mod_base = OTHER; note R-N-(1,3-dimethylimidazolidin-2-ylidene)phosphoramidate
  modified_base 7: mod_base = OTHER; note = 2-fluororibose uracil
  modified_base 7..8: mod_base = OTHER; note = S-phosphorothioate
  modified_base 8: mod_base = OTHER; note = 2-fluororibose guanine
  modified_base 8..9: mod_base = OTHER; note = S-phosphorothioate
  modified_base 9: mod_base = OTHER; note = 2-fluororibose uracil
  modified_base 9..10: mod_base = OTHER; note = S-phosphorothioate
  modified_base 10: mod_base = OTHER; note = 2-fluororibose guanine
  modified_base 10..11: mod_base = OTHER; note = S-phosphorothioate
  modified_base 11: mod_base = OTHER; note = 2-fluororibose guanine
  modified_base 11..12: mod_base = OTHER; note = S-phosphorothioate
  modified_base 12: mod_base = OTHER; note = 2-fluororibose cytosine
  modified_base 12..13: mod_base = OTHER; note = S-phosphorothioate
  modified_base 13: mod_base = OTHER; note = 2-fluororibose adenine
  modified_base 13..14: mod_base = OTHER; note = S-phosphorothioate
  modified_base 14: mod_base = OTHER; note = 2-fluororibose cytosine
  modified_base 14..15: mod_base = OTHER; note R-N-(1,3-dimethylimidazolidin-2-ylidene)phosphoramidate
  modified_base 15: mod_base = OTHER; note = 2-fluororibose cytosine
  modified_base 16: mod_base = cm
  modified_base 16..17: mod_base = OTHER; note = S-phosphorothioate
  modified_base 17: mod_base = OTHER; note = 2-O-methylribose adenine
  modified_base 18: mod_base = gm
  modified_base 18..19: mod_base = OTHER; note = S-phosphorothioate
  modified_base 19: mod_base = OTHER; note = 2-O-methylribose adenine
  modified_base 20: mod_base = um
  modified_base 20..21: mod_base = OTHER; note = S-phosphorothioate
  modified_base 21: mod_base = um
  modified_base 22: mod_base = OTHER; note = 2-O-methylribose adenine
  modified_base 22..23: mod_base = OTHER; note = S-phosphorothioate
  modified_base 23: mod_base = um
  modified_base 24: mod_base = OTHER; note = 2-fluororibose cytosine
  modified_base 24..25: mod_base = OTHER; note = S-phosphorothioate
  modified_base 25: mod_base = OTHER; note = deoxyribose cytosine
  modified_base 25..26: mod_base = OTHER; note = S-phosphorothioate
  modified_base 26: mod_base = OTHER; note = deoxyribose adenine
  modified_base 26..27: mod_base = OTHER; note R-N-(1,3-dimethylimidazolidin-2-ylidene)phosphoramidate
  modified_base 27: mod_base = um
  modified_base 27..28: mod_base = OTHER; note = S-phosphorothioate
  modified_base 28: mod_base = gm
  modified_base 28..29: mod_base = OTHER; note = S-phosphorothioate
  modified_base 29: mod_base = um
  modified_base 29..30: mod_base = OTHER; note R-N-(1,3-dimethylimidazolidin-2-ylidene)phosphoramidate
  modified_base 30: mod_base = um
  source 1..30: mol_type = other RNA

SEQ ID NO: 697 - RNA, 30 nt, synthetic construct; identical to SEQ ID NO: 1
  misc_feature 1..30: note = Synthetic: WV-44006
  misc_feature 1..30: note = Synthetic: ADR-0100515
  modified_base 1: mod_base = OTHER; note = triantennary GalNAc with C12 linker linked to 6-aminohexanol linked by phosphate to the 5' end of 2-fluororibose adenine
  modified_base 1..2: mod_base = OTHER; note = S-phosphorothioate
  modified_base 2: mod_base = OTHER; note = 2-fluororibose uracil
  modified_base 2..3: mod_base = OTHER; note = S-phosphorothioate
  modified_base 3: mod_base = OTHER; note = 2-fluororibose cytosine
  modified_base 3..4: mod_base = OTHER; note R-N-(1,3-dimethylimidazolidin-2-ylidene)phosphoramidate
  modified_base 4: mod_base = OTHER; note = 2-fluororibose cytosine
  modified_base 4..5: mod_base = OTHER; note = S-phosphorothioate
  modified_base 5: mod_base = OTHER; note = 2-fluororibose adenine
  modified_base 5..6: mod_base = OTHER; note = S-phosphorothioate
  modified_base 6: mod_base = OTHER; note = 2-fluororibose cytosine
  modified_base 6..7: mod_base = OTHER; note R-N-(1,3-dimethylimidazolidin-2-ylidene)phosphoramidate
  modified_base 7: mod_base = OTHER; note = 2-fluororibose uracil
  modified_base 7..8: mod_base = OTHER; note = S-phosphorothioate
  modified_base 8: mod_base = OTHER; note = 2-fluororibose guanine
  modified_base 8..9: mod_base = OTHER; note = S-phosphorothioate
  modified_base 9: mod_base = OTHER; note = 2-fluororibose uracil
  modified_base 9..10: mod_base = OTHER; note = S-phosphorothioate
  modified_base 10: mod_base = OTHER; note = 2-fluororibose guanine
  modified_base 10..11: mod_base = OTHER; note = S-phosphorothioate
  modified_base 11: mod_base = OTHER; note = 2-fluororibose guanine
  modified_base 11..12: mod_base = OTHER; note = S-phosphorothioate
  modified_base 12: mod_base = OTHER; note = 2-fluororibose cytosine
  modified_base 12..13: mod_base = OTHER; note = S-phosphorothioate
  modified_base 13: mod_base = OTHER; note = 2-fluororibose adenine
  modified_base 13..14: mod_base = OTHER; note = S-phosphorothioate
  modified_base 14: mod_base = OTHER; note = 2-fluororibose cytosine
  modified_base 14..15: mod_base = OTHER; note R-N-(1,3-dimethylimidazolidin-2-ylidene)phosphoramidate
  modified_base 15: mod_base = OTHER; note = 2-fluororibose cytosine
  modified_base 15..16: mod_base = OTHER; note = S-phosphorothioate
  modified_base 16: mod_base = cm
  modified_base 16..17: mod_base = OTHER; note = S-phosphorothioate
  modified_base 17: mod_base = OTHER; note = 2-O-methylribose adenine
  modified_base 17..18: mod_base = OTHER; note = S-phosphorothioate
  modified_base 18: mod_base = gm
  modified_base 19: mod_base = OTHER; note = 2-O-methylribose adenine
  modified_base 19..20: mod_base = OTHER; note = S-phosphorothioate
  modified_base 20: mod_base = um
  modified_base 21: mod_base = um
  modified_base 21..22: mod_base = OTHER; note = S-phosphorothioate
  modified_base 22: mod_base = OTHER; note = 2-O-methylribose adenine
  modified_base 22..23: mod_base = OTHER; note = S-phosphorothioate
  modified_base 23: mod_base = um
  modified_base 23..24: mod_base = OTHER; note = S-phosphorothioate
  modified_base 24: mod_base = OTHER; note = 2-fluororibose cytosine
  modified_base 24..25: mod_base = OTHER; note = S-phosphorothioate
  modified_base 25: mod_base = OTHER; note = deoxyribose cytosine
  modified_base 25..26: mod_base = OTHER; note = S-phosphorothioate
  modified_base 26: mod_base = OTHER; note = deoxyribose adenine
  modified_base 26..27: mod_base = OTHER; note R-N-(1,3-dimethylimidazolidin-2-ylidene)phosphoramidate
  modified_base 27: mod_base = um
  modified_base 27..28: mod_base = OTHER; note = S-phosphorothioate
  modified_base 28: mod_base = gm
  modified_base 28..29: mod_base = OTHER; note = S-phosphorothioate
  modified_base 29: mod_base = um
  modified_base 29..30: mod_base = OTHER; note R-N-(1,3-dimethylimidazolidin-2-ylidene)phosphoramidate
  modified_base 30: mod_base = um
  source 1..30: mol_type = other RNA

SEQ ID NO: 698 - RNA, 30 nt, synthetic construct; identical to SEQ ID NO: 1
  misc_feature 1..30: note = Synthetic: WV-44007
  misc_feature 1..30: note = Synthetic: ADR-0100516
  modified_base 1: mod_base = OTHER; note = triantennary GalNAc with C12 linker linked to 6-aminohexanol linked by phosphate to the 5' end of 2-fluororibose adenine
  modified_base 1..2: mod_base = OTHER; note = S-phosphorothioate
  modified_base 2: mod_base = OTHER; note = 2-fluororibose uracil
  modified_base 2..3: mod_base = OTHER; note = S-phosphorothioate
  modified_base 3: mod_base = OTHER; note = 2-fluororibose cytosine
  modified_base 3..4: mod_base = OTHER; note R-N-(1,3-dimethylimidazolidin-2-ylidene)phosphoramidate
  modified_base 4: mod_base = OTHER; note = 2-fluororibose cytosine
  modified_base 4..5: mod_base = OTHER; note = S-phosphorothioate
  modified_base 5: mod_base = OTHER; note = 2-fluororibose adenine
  modified_base 5..6: mod_base = OTHER; note = S-phosphorothioate
  modified_base 6: mod_base = OTHER; note = 2-fluororibose cytosine
  modified_base 6..7: mod_base = OTHER; note R-N-(1,3-dimethylimidazolidin-2-ylidene)phosphoramidate
  modified_base 7: mod_base = OTHER; note = 2-fluororibose uracil
  modified_base 7..8: mod_base = OTHER; note = S-phosphorothioate
  modified_base 8: mod_base = OTHER; note = 2-fluororibose guanine
  modified_base 8..9: mod_base = OTHER; note = S-phosphorothioate
  modified_base 9: mod_base = OTHER; note = 2-fluororibose uracil
  modified_base 9..10: mod_base = OTHER; note = S-phosphorothioate
  modified_base 10: mod_base = OTHER; note = 2-fluororibose guanine
  modified_base 10..11: mod_base = OTHER; note = S-phosphorothioate
  modified_base 11: mod_base = OTHER; note = 2-fluororibose guanine
  modified_base 11..12: mod_base = OTHER; note = S-phosphorothioate
  modified_base 12: mod_base = OTHER; note = 2-fluororibose cytosine
  modified_base 12..13: mod_base = OTHER; note = S-phosphorothioate
  modified_base 13: mod_base = OTHER; note = 2-fluororibose adenine
  modified_base 13..14: mod_base = OTHER; note = S-phosphorothioate
  modified_base 14: mod_base = OTHER; note = 2-fluororibose cytosine
  modified_base 14..15: mod_base = OTHER; note R-N-(1,3-dimethylimidazolidin-2-ylidene)phosphoramidate
  modified_base 15: mod_base = OTHER; note = 2-fluororibose cytosine
  modified_base 15..16: mod_base = OTHER; note = S-phosphorothioate
  modified_base 16: mod_base = cm
  modified_base 16..17: mod_base = OTHER; note = S-phosphorothioate
  modified_base 17: mod_base = OTHER; note = 2-O-methylribose adenine
  modified_base 17..18: mod_base = OTHER; note = S-phosphorothioate
  modified_base 18: mod_base = gm
  modified_base 19: mod_base = OTHER; note = 2-O-methylribose adenine
  modified_base 19..20: mod_base = OTHER; note = S-phosphorothioate
  modified_base 20: mod_base = um
  modified_base 21: mod_base = um
  modified_base 21..22: mod_base = OTHER; note = S-phosphorothioate
  modified_base 22: mod_base = OTHER; note = 2-O-methylribose adenine
  modified_base 23: mod_base = um
  modified_base 23..24: mod_base = OTHER; note = S-phosphorothioate
  modified_base 24: mod_base = OTHER; note = 2-fluororibose cytosine
  modified_base 24..25: mod_base = OTHER; note = S-phosphorothioate
  modified_base 25: mod_base = OTHER; note = deoxyribose cytosine
  modified_base 25..26: mod_base = OTHER; note = S-phosphorothioate
  modified_base 26: mod_base = OTHER; note = deoxyribose adenine
  modified_base 26..27: mod_base = OTHER; note R-N-(1,3-dimethylimidazolidin-2-ylidene)phosphoramidate
  modified_base 27: mod_base = um
  modified_base 27..28: mod_base = OTHER; note = S-phosphorothioate
  modified_base 28: mod_base = gm
  modified_base 28..29: mod_base = OTHER; note = S-phosphorothioate
  modified_base 29: mod_base = um
  modified_base 29..30: mod_base = OTHER; note R-N-(1,3-dimethylimidazolidin-2-ylidene)phosphoramidate
  modified_base 30: mod_base = um
  source 1..30: mol_type = other RNA

SEQ ID NO: 699 - RNA, 30 nt, synthetic construct; identical to SEQ ID NO: 1
  misc_feature 1..30: note = Synthetic: WV-44008
  misc_feature 1..30: note = Synthetic: ADR-0100517
  modified_base 1: mod_base = OTHER; note = triantennary GalNAc with C12 linker linked to 6-aminohexanol linked by phosphate to the 5' end of 2-fluororibose adenine
  modified_base 1..2: mod_base = OTHER; note = S-phosphorothioate
  modified_base 2: mod_base = OTHER; note = 2-fluororibose uracil
  modified_base 2..3: mod_base = OTHER; note = S-phosphorothioate
  modified_base 3: mod_base = OTHER; note = 2-fluororibose cytosine
  modified_base 3..4: mod_base = OTHER; note R-N-(1,3-dimethylimidazolidin-2-ylidene)phosphoramidate
  modified_base 4: mod_base = OTHER; note = 2-fluororibose cytosine
  modified_base 4..5: mod_base = OTHER; note = S-phosphorothioate
  modified_base 5: mod_base = OTHER; note = 2-fluororibose adenine
  modified_base 5..6: mod_base = OTHER; note = S-phosphorothioate
  modified_base 6: mod_base = OTHER; note = 2-fluororibose cytosine
  modified_base 6..7: mod_base = OTHER; note R-N-(1,3-dimethylimidazolidin-2-ylidene)phosphoramidate
  modified_base 7: mod_base = OTHER; note = 2-fluororibose uracil
  modified_base 7..8: mod_base = OTHER; note = S-phosphorothioate
  modified_base 8: mod_base = OTHER; note = 2-fluororibose guanine
  modified_base 8..9: mod_base = OTHER; note = S-phosphorothioate
  modified_base 9: mod_base = OTHER; note = 2-fluororibose uracil
  modified_base 9..10: mod_base = OTHER; note = S-phosphorothioate
  modified_base 10: mod_base = OTHER; note = 2-fluororibose guanine
  modified_base 10..11: mod_base = OTHER; note = S-phosphorothioate
  modified_base 11: mod_base = OTHER; note = 2-fluororibose guanine
  modified_base 11..12: mod_base = OTHER; note = S-phosphorothioate
  modified_base 12: mod_base = OTHER; note = 2-fluororibose cytosine
  modified_base 12..13: mod_base = OTHER; note = S-phosphorothioate
  modified_base 13: mod_base = OTHER; note = 2-fluororibose adenine
  modified_base 13..14: mod_base = OTHER; note = S-phosphorothioate
  modified_base 14: mod_base = OTHER; note = 2-fluororibose cytosine
  modified_base 14..15: mod_base = OTHER; note R-N-(1,3-dimethylimidazolidin-2-ylidene)phosphoramidate
  modified_base 15: mod_base = OTHER; note = 2-fluororibose cytosine
  modified_base 16: mod_base = cm
  modified_base 16..17: mod_base = OTHER; note = S-phosphorothioate
  modified_base 17: mod_base = OTHER; note = 2-O-methylribose adenine
  modified_base 17..18: mod_base = OTHER; note = S-phosphorothioate
  modified_base 18: mod_base = gm
  modified_base 19: mod_base = OTHER; note = 2-O-methylribose adenine
  modified_base 19..20: mod_base = OTHER; note = S-phosphorothioate
  modified_base 20: mod_base = um
  modified_base 21: mod_base = um
  modified_base 21..22: mod_base = OTHER; note = S-phosphorothioate
  modified_base 22: mod_base = OTHER; note = 2-O-methylribose adenine
  modified_base 22..23: mod_base = OTHER; note = S-phosphorothioate
  modified_base 23: mod_base = um
  modified_base 24: mod_base = OTHER; note = 2-fluororibose cytosine
  modified_base 24..25: mod_base = OTHER; note = S-phosphorothioate
  modified_base 25: mod_base = OTHER; note = deoxyribose cytosine
  modified_base 25..26: mod_base = OTHER; note = S-phosphorothioate
  modified_base 26: mod_base = OTHER; note = deoxyribose adenine
  modified_base 26..27: mod_base = OTHER; note R-N-(1,3-dimethylimidazolidin-2-ylidene)phosphoramidate
  modified_base 27: mod_base = um
  modified_base 27..28: mod_base = OTHER; note = S-phosphorothioate
  modified_base 28: mod_base = gm
  modified_base 28..29: mod_base = OTHER; note = S-phosphorothioate
  modified_base 29: mod_base = um
  modified_base 29..30: mod_base = OTHER; note R-N-(1,3-dimethylimidazolidin-2-ylidene)phosphoramidate
  modified_base 30: mod_base = um
  source 1..30: mol_type = other RNA

SEQ ID NO: 700 - RNA, 30 nt, synthetic construct; identical to SEQ ID NO: 1
  misc_feature 1..30: note = Synthetic: WV-44009
  misc_feature 1..30: note = Synthetic: ADR-0100518
  modified_base 1: mod_base = OTHER; note = triantennary GalNAc with C12 linker linked to 6-aminohexanol linked by phosphate to the 5' end of 2-fluororibose adenine
  modified_base 1..2: mod_base = OTHER; note = S-phosphorothioate
  modified_base 2: mod_base = OTHER; note = 2-fluororibose uracil
  modified_base 2..3: mod_base = OTHER; note = S-phosphorothioate
  modified_base 3: mod_base = OTHER; note = 2-fluororibose cytosine
  modified_base 3..4: mod_base = OTHER; note R-N-(1,3-dimethylimidazolidin-2-ylidene)phosphoramidate
  modified_base 4: mod_base = OTHER; note = 2-fluororibose cytosine
  modified_base 4..5: mod_base = OTHER; note = S-phosphorothioate
  modified_base 5: mod_base = OTHER; note = 2-fluororibose adenine
  modified_base 5..6: mod_base = OTHER; note = S-phosphorothioate
  modified_base 6: mod_base = OTHER; note = 2-fluororibose cytosine
  modified_base 6..7: mod_base = OTHER; note R-N-(1,3-dimethylimidazolidin-2-ylidene)phosphoramidate
  modified_base 7: mod_base = OTHER; note = 2-fluororibose uracil
  modified_base 7..8: mod_base = OTHER; note = S-phosphorothioate
  modified_base 8: mod_base = OTHER; note = 2-fluororibose guanine
  modified_base 8..9: mod_base = OTHER; note = S-phosphorothioate
  modified_base 9: mod_base = OTHER; note = 2-fluororibose uracil
  modified_base 9..10: mod_base = OTHER; note = S-phosphorothioate
  modified_base 10: mod_base = OTHER; note = 2-fluororibose guanine
  modified_base 10..11: mod_base = OTHER; note = S-phosphorothioate
  modified_base 11: mod_base = OTHER; note = 2-fluororibose guanine
  modified_base 11..12: mod_base = OTHER; note = S-phosphorothioate
  modified_base 12: mod_base = OTHER; note = 2-fluororibose cytosine
  modified_base 12..13: mod_base = OTHER; note = S-phosphorothioate
  modified_base 13: mod_base = OTHER; note = 2-fluororibose adenine
  modified_base 13..14: mod_base = OTHER; note = S-phosphorothioate
  modified_base 14: mod_base = OTHER; note = 2-fluororibose cytosine
  modified_base 14..15: mod_base = OTHER; note R-N-(1,3-dimethylimidazolidin-2-ylidene)phosphoramidate
  modified_base 15: mod_base = OTHER; note = 2-fluororibose cytosine
  modified_base 16: mod_base = cm
  modified_base 16..17: mod_base = OTHER; note = S-phosphorothioate
  modified_base 17: mod_base = OTHER; note = 2-O-methylribose adenine
  modified_base 17..18: mod_base = OTHER; note = S-phosphorothioate
  modified_base 18: mod_base = gm
  modified_base 19: mod_base = OTHER; note = 2-O-methylribose adenine
  modified_base 19..20: mod_base = OTHER; note = S-phosphorothioate
  modified_base 20: mod_base = um
  modified_base 21: mod_base = um
  modified_base 21..22: mod_base = OTHER; note = S-phosphorothioate
  modified_base 22: mod_base = OTHER; note = 2-O-methylribose adenine
  modified_base 23: mod_base = um
  modified_base 24: mod_base = OTHER; note = 2-fluororibose cytosine
  modified_base 24..25: mod_base = OTHER; note = S-phosphorothioate
  modified_base 25: mod_base = OTHER; note = deoxyribose cytosine
  modified_base 25..26: mod_base = OTHER; note = S-phosphorothioate
  modified_base 26: mod_base = OTHER; note = deoxyribose adenine
  modified_base 26..27: mod_base = OTHER; note R-N-(1,3-dimethylimidazolidin-2-ylidene)phosphoramidate
  modified_base 27: mod_base = um
  modified_base 27..28: mod_base = OTHER; note = S-phosphorothioate
  modified_base 28: mod_base = gm
  modified_base 28..29: mod_base = OTHER; note = S-phosphorothioate
  modified_base 29: mod_base = um
  modified_base 29..30: mod_base = OTHER; note R-N-(1,3-dimethylimidazolidin-2-ylidene)phosphoramidate
  modified_base 30: mod_base = um
  source 1..30: mol_type = other RNA

SEQ ID NO: 701 - RNA, 30 nt, synthetic construct; identical to SEQ ID NO: 1
  misc_feature 1..30: note = Synthetic: WV-44012
  misc_feature 1..30: note = Synthetic: ADR-0100521
  modified_base 1: mod_base = OTHER; note = triantennary GalNAc with C12 linker linked to 6-aminohexanol linked by phosphate to the 5' end of 2-fluororibose adenine
  modified_base 1..2: mod_base = OTHER; note = S-phosphorothioate
  modified_base 2: mod_base = OTHER; note = 2-fluororibose uracil
  modified_base 2..3: mod_base = OTHER; note = S-phosphorothioate
  modified_base 3: mod_base = OTHER; note = 2-fluororibose cytosine
  modified_base 3..4: mod_base = OTHER; note R-N-(1,3-dimethylimidazolidin-2-ylidene)phosphoramidate
  modified_base 4: mod_base = OTHER; note = 2-fluororibose cytosine
  modified_base 4..5: mod_base = OTHER; note = S-phosphorothioate
  modified_base 5: mod_base = OTHER; note = 2-fluororibose adenine
  modified_base 5..6: mod_base = OTHER; note = S-phosphorothioate
  modified_base 6: mod_base = OTHER; note = 2-fluororibose cytosine
  modified_base 6..7: mod_base = OTHER; note R-N-(1,3-dimethylimidazolidin-2-ylidene)phosphoramidate
  modified_base 7: mod_base = OTHER; note = 2-fluororibose uracil
  modified_base 7..8: mod_base = OTHER; note = S-phosphorothioate
  modified_base 8: mod_base = OTHER; note = 2-fluororibose guanine
  modified_base 8..9: mod_base = OTHER; note = S-phosphorothioate
  modified_base 9: mod_base = OTHER; note = 2-fluororibose uracil
  modified_base 9..10: mod_base = OTHER; note = S-phosphorothioate
  modified_base 10: mod_base = OTHER; note = 2-fluororibose guanine
  modified_base 10..11: mod_base = OTHER; note = S-phosphorothioate
  modified_base 11: mod_base = OTHER; note = 2-fluororibose guanine
  modified_base 11..12: mod_base = OTHER; note = S-phosphorothioate
  modified_base 12: mod_base = OTHER; note = 2-fluororibose cytosine
  modified_base 12..13: mod_base = OTHER; note = S-phosphorothioate
  modified_base 13: mod_base = OTHER; note = 2-fluororibose adenine
  modified_base 13..14: mod_base = OTHER; note = S-phosphorothioate
  modified_base 14: mod_base = OTHER; note = 2-fluororibose cytosine
  modified_base 14..15: mod_base = OTHER; note R-N-(1,3-dimethylimidazolidin-2-ylidene)phosphoramidate
  modified_base 15: mod_base = OTHER; note = 2-fluororibose cytosine
  modified_base 16: mod_base = cm
  modified_base 17: mod_base = OTHER; note = 2-O-methylribose adenine
  modified_base 18: mod_base = gm
  modified_base 19: mod_base = OTHER; note = 2-O-methylribose adenine
  modified_base 20: mod_base = um
  modified_base 21: mod_base = um
  modified_base 22: mod_base = OTHER; note = 2-O-methylribose adenine
  modified_base 23: mod_base = um
  modified_base 23..24: mod_base = OTHER; note = S-phosphorothioate
  modified_base 24: mod_base = OTHER; note = 2-fluororibose cytosine
  modified_base 24..25: mod_base = OTHER; note = S-phosphorothioate
  modified_base 25: mod_base = OTHER; note = deoxyribose cytosine
  modified_base 25..26: mod_base = OTHER; note = S-phosphorothioate
  modified_base 26: mod_base = OTHER; note = deoxyribose adenine
  modified_base 26..27: mod_base = OTHER; note R-N-(1,3-dimethylimidazolidin-2-ylidene)phosphoramidate
  modified_base 27: mod_base = um
  modified_base 27..28: mod_base = OTHER; note = S-phosphorothioate
  modified_base 28: mod_base = gm
  modified_base 28..29: mod_base = OTHER; note = S-phosphorothioate
  modified_base 29: mod_base = um
  modified_base 29..30: mod_base = OTHER; note R-N-(1,3-dimethylimidazolidin-2-ylidene)phosphoramidate
  modified_base 30: mod_base = um
  source 1..30: mol_type = other RNA

SEQ ID NO: 702 - RNA, 30 nt, synthetic construct; identical to SEQ ID NO: 1
  misc_feature 1..30: note = Synthetic: WV-44060
  misc_feature 1..30: note = Synthetic: ADR-0100526
  modified_base 1: mod_base = OTHER; note = triantennary GalNAc with C12 linker linked to 6-aminohexanol linked by phosphate to the 5' end of 2-fluororibose adenine
  modified_base 1..2: mod_base = OTHER; note = S-phosphorothioate
  modified_base 2: mod_base = OTHER; note = 2-fluororibose uracil
  modified_base 2..3: mod_base = OTHER; note = S-phosphorothioate
  modified_base 3: mod_base = OTHER; note = 2-fluororibose cytosine
  modified_base 3..4: mod_base = OTHER; note R-N-(1,3-dimethylimidazolidin-2-ylidene)phosphoramidate
  modified_base 4: mod_base = OTHER; note = 2-fluororibose cytosine
  modified_base 4..5: mod_base = OTHER; note = S-phosphorothioate
  modified_base 5: mod_base = OTHER; note = 2-fluororibose adenine
  modified_base 5..6: mod_base = OTHER; note = S-phosphorothioate
  modified_base 6: mod_base = OTHER; note = 2-fluororibose cytosine
  modified_base 6..7: mod_base = OTHER; note R-N-(1,3-dimethylimidazolidin-2-ylidene)phosphoramidate
  modified_base 7: mod_base = OTHER; note = 2-fluororibose uracil
  modified_base 8: mod_base = OTHER; note = 2-fluororibose guanine
  modified_base 9: mod_base = OTHER; note = 2-fluororibose uracil
  modified_base 10: mod_base = OTHER; note = 2-fluororibose guanine
  modified_base 11: mod_base = OTHER; note = 2-fluororibose guanine
  modified_base 12: mod_base = OTHER; note = 2-fluororibose cytosine
  modified_base 13: mod_base = OTHER; note = 2-fluororibose adenine
  modified_base 14: mod_base = OTHER; note = 2-fluororibose cytosine
  modified_base 14..15: mod_base = OTHER; note R-N-(1,3-dimethylimidazolidin-2-ylidene)phosphoramidate
  modified_base 15: mod_base = OTHER; note = 2-fluororibose cytosine
  modified_base 16: mod_base = cm
  modified_base 17: mod_base = OTHER; note = 2-O-methylribose adenine
  modified_base 18: mod_base = gm
  modified_base 19: mod_base = OTHER; note = 2-O-methylribose adenine
  modified_base 20: mod_base = um
  modified_base 21: mod_base = um
  modified_base 22: mod_base = OTHER; note = 2-O-methylribose adenine
  modified_base 23: mod_base = um
  modified_base 23..24: mod_base = OTHER; note = S-phosphorothioate
  modified_base 24: mod_base = OTHER; note = 2-fluororibose cytosine
  modified_base 24..25: mod_base = OTHER; note = S-phosphorothioate
  modified_base 25: mod_base = OTHER; note = deoxyribose cytosine
  modified_base 25..26: mod_base = OTHER; note = S-phosphorothioate
  modified_base 26: mod_base = OTHER; note = deoxyribose adenine
  modified_base 26..27: mod_base = OTHER; note R-N-(1,3-dimethylimidazolidin-2-ylidene)phosphoramidate
  modified_base 27: mod_base = um
  modified_base 27..28: mod_base = OTHER; note = S-phosphorothioate
  modified_base 28: mod_base = gm
  modified_base 28..29: mod_base = OTHER; note = S-phosphorothioate
  modified_base 29: mod_base = um
  modified_base 29..30: mod_base = OTHER; note R-N-(1,3-dimethylimidazolidin-2-ylidene)phosphoramidate
  modified_base 30: mod_base = um
  source 1..30: mol_type = other RNA

SEQ ID NO: 703 - RNA, 30 nt, synthetic construct; identical to SEQ ID NO: 1
  misc_feature 1..30: note = Synthetic: WV-43980
  misc_feature 1..30: note = Synthetic: ADR-0100503
  modified_base 1: mod_base = OTHER; note = triantennary GalNAc with C12 linker linked to 6-aminohexanol linked by phosphate to the 5' end of 2-fluororibose adenine
  modified_base 1..2: mod_base = OTHER; note R-N-(1,3-dimethylimidazolidin-2-ylidene)phosphoramidate
  modified_base 2: mod_base = OTHER; note = 2-fluororibose uracil
  modified_base 2..3: mod_base = OTHER; note = S-phosphorothioate
  modified_base 3: mod_base = OTHER; note = 2-fluororibose cytosine
  modified_base 3..4: mod_base = OTHER; note = S-phosphorothioate
  modified_base 4: mod_base = OTHER; note = 2-fluororibose cytosine
  modified_base 4..5: mod_base = OTHER; note = S-phosphorothioate
  modified_base 5: mod_base = OTHER; note = 2-fluororibose adenine
  modified_base 5..6: mod_base = OTHER; note = S-phosphorothioate
  modified_base 6: mod_base = OTHER; note = 2-fluororibose cytosine
  modified_base 6..7: mod_base = OTHER; note = S-phosphorothioate
  modified_base 7: mod_base = OTHER; note = 2-fluororibose uracil
  modified_base 7..8: mod_base = OTHER; note = S-phosphorothioate
  modified_base 8: mod_base = OTHER; note = 2-fluororibose guanine
  modified_base 8..9: mod_base = OTHER; note = S-phosphorothioate
  modified_base 9: mod_base = OTHER; note = 2-fluororibose uracil
  modified_base 9..10: mod_base = OTHER; note = S-phosphorothioate
  modified_base 10: mod_base = OTHER; note = 2-fluororibose guanine
  modified_base 10..11: mod_base = OTHER; note = S-phosphorothioate
  modified_base 11: mod_base = OTHER; note = 2-fluororibose guanine
  modified_base 11..12: mod_base = OTHER; note = S-phosphorothioate
  modified_base 12: mod_base = OTHER; note = 2-fluororibose cytosine
  modified_base 12..13: mod_base = OTHER; note = S-phosphorothioate
  modified_base 13: mod_base = OTHER; note = 2-fluororibose adenine
  modified_base 13..14: mod_base = OTHER; note = S-phosphorothioate
  modified_base 14: mod_base = OTHER; note = 2-fluororibose cytosine
  modified_base 14..15: mod_base = OTHER; note R-N-(1,3-dimethylimidazolidin-2-ylidene)phosphoramidate
  modified_base 15: mod_base = OTHER; note = 2-fluororibose cytosine
  modified_base 15..16: mod_base = OTHER; note = S-phosphorothioate
  modified_base 16: mod_base = cm
  modified_base 17: mod_base = OTHER; note = 2-O-methylribose adenine
  modified_base 18: mod_base = gm
  modified_base 19: mod_base = OTHER; note = 2-O-methylribose adenine
  modified_base 20: mod_base = um
  modified_base 21: mod_base = um
  modified_base 22: mod_base = OTHER; note = 2-O-methylribose adenine
  modified_base 22..23: mod_base = OTHER; note = S-phosphorothioate
  modified_base 23: mod_base = um
  modified_base 23..24: mod_base = OTHER; note = S-phosphorothioate
  modified_base 24: mod_base = OTHER; note = 2-fluororibose cytosine
  modified_base 24..25: mod_base = OTHER; note = S-phosphorothioate
  modified_base 25: mod_base = OTHER; note = deoxyribose cytosine
  modified_base 25..26: mod_base = OTHER; note = S-phosphorothioate
  modified_base 26: mod_base = OTHER; note = deoxyribose adenine
  modified_base 26..27: mod_base = OTHER; note R-N-(1,3-dimethylimidazolidin-2-ylidene)phosphoramidate
  modified_base 27: mod_base = um
  modified_base 27..28: mod_base = OTHER; note = S-phosphorothioate
  modified_base 28: mod_base = gm
  modified_base 28..29: mod_base = OTHER; note = S-phosphorothioate
  modified_base 29: mod_base = um
  modified_base 29..30: mod_base = OTHER; note R-N-(1,3-dimethylimidazolidin-2-ylidene)phosphoramidate
  modified_base 30: mod_base = um
  source 1..30: mol_type = other RNA

SEQ ID NO: 704 - RNA, 30 nt, synthetic construct; identical to SEQ ID NO: 1
  misc_feature 1..30: note = Synthetic: WV-43983
  misc_feature 1..30: note = Synthetic: ADR-0100506
  modified_base 1: mod_base = OTHER; note = triantennary GalNAc with C12 linker linked to 6-aminohexanol linked by phosphate to the 5' end of 2-fluororibose adenine
  modified_base 1..2: mod_base = OTHER; note R-N-(1,3-dimethylimidazolidin-2-ylidene)phosphoramidate
  modified_base 2: mod_base = OTHER; note = 2-fluororibose uracil
  modified_base 2..3: mod_base = OTHER; note = S-phosphorothioate
  modified_base 3: mod_base = OTHER; note = 2-fluororibose cytosine
  modified_base 3..4: mod_base = OTHER; note = S-phosphorothioate
  modified_base 4: mod_base = OTHER; note = 2-fluororibose cytosine
  modified_base 4..5: mod_base = OTHER; note = S-phosphorothioate
  modified_base 5: mod_base = OTHER; note = 2-fluororibose adenine
  modified_base 6: mod_base = OTHER; note = 2-fluororibose cytosine
  modified_base 6..7: mod_base = OTHER; note = S-phosphorothioate
  modified_base 7: mod_base = OTHER; note = 2-fluororibose uracil
  modified_base 7..8: mod_base = OTHER; note = S-phosphorothioate
  modified_base 8: mod_base = OTHER; note = 2-fluororibose guanine
  modified_base 8..9: mod_base = OTHER; note = S-phosphorothioate
  modified_base 9: mod_base = OTHER; note = 2-fluororibose uracil
  modified_base 9..10: mod_base = OTHER; note = S-phosphorothioate
  modified_base 10: mod_base = OTHER; note = 2-fluororibose guanine
  modified_base 11: mod_base = OTHER; note = 2-fluororibose guanine
  modified_base 11..12: mod_base = OTHER; note = S-phosphorothioate
  modified_base 12: mod_base = OTHER; note = 2-fluororibose cytosine
  modified_base 12..13: mod_base = OTHER; note = S-phosphorothioate
  modified_base 13: mod_base = OTHER; note = 2-fluororibose adenine
  modified_base 13..14: mod_base = OTHER; note = S-phosphorothioate
  modified_base 14: mod_base = OTHER; note = 2-fluororibose cytosine
  modified_base 14..15: mod_base = OTHER; note R-N-(1,3-dimethylimidazolidin-2-ylidene)phosphoramidate
  modified_base 15: mod_base = OTHER; note = 2-fluororibose cytosine
  modified_base 15..16: mod_base = OTHER; note = S-phosphorothioate
  modified_base 16: mod_base = cm
  modified_base 16..17: mod_base = OTHER; note R-N-(1,3-dimethylimidazolidin-2-ylidene)phosphoramidate
  modified_base 17: mod_base = OTHER; note = 2-O-methylribose adenine
  modified_base 17..18: mod_base = OTHER; note = S-phosphorothioate
  modified_base 18: mod_base = gm
  modified_base 19: mod_base = OTHER; note = 2-O-methylribose adenine
  modified_base 19..20: mod_base = OTHER; note = S-phosphorothioate
  modified_base 20: mod_base = um
  modified_base 20..21: mod_base = OTHER; note = S-phosphorothioate
  modified_base 21: mod_base = um
  modified_base 21..22: mod_base = OTHER; note = S-phosphorothioate
  modified_base 22: mod_base = OTHER; note = 2-O-methylribose adenine
  modified_base 23: mod_base = um
  modified_base 23..24: mod_base = OTHER; note = S-phosphorothioate
  modified_base 24: mod_base = OTHER; note = 2-fluororibose cytosine
  modified_base 24..25: mod_base = OTHER; note = S-phosphorothioate
  modified_base 25: mod_base = OTHER; note = deoxyribose cytosine
  modified_base 25..26: mod_base = OTHER; note = S-phosphorothioate
  modified_base 26: mod_base = OTHER; note = deoxyribose adenine
  modified_base 26..27: mod_base = OTHER; note R-N-(1,3-dimethylimidazolidin-2-ylidene)phosphoramidate
  modified_base 27: mod_base = um
  modified_base 27..28: mod_base = OTHER; note = S-phosphorothioate
  modified_base 28: mod_base = gm
  modified_base 28..29: mod_base = OTHER; note = S-phosphorothioate
  modified_base 29: mod_base = um
  modified_base 29..30: mod_base = OTHER; note R-N-(1,3-dimethylimidazolidin-2-ylidene)phosphoramidate
  modified_base 30: mod_base = um
  source 1..30: mol_type = other RNA

SEQ ID NO: 705 - RNA, 30 nt, synthetic construct; identical to SEQ ID NO: 1
  misc_feature 1..30: note = Synthetic: WV-43984
  misc_feature 1..30: note = Synthetic: ADR-0100507
  modified_base 1: mod_base = OTHER; note = triantennary GalNAc with C12 linker linked to 6-aminohexanol linked by phosphate to the 5' end of 2-fluororibose adenine
  modified_base 1..2: mod_base = OTHER; note R-N-(1,3-dimethylimidazolidin-2-ylidene)phosphoramidate
  modified_base 2: mod_base = OTHER; note = 2-fluororibose uracil
  modified_base 2..3: mod_base = OTHER; note = S-phosphorothioate
  modified_base 3: mod_base = OTHER; note = 2-fluororibose cytosine
  modified_base 3..4: mod_base = OTHER; note = S-phosphorothioate
  modified_base 4: mod_base = OTHER; note = 2-fluororibose cytosine
  modified_base 4..5: mod_base = OTHER; note = S-phosphorothioate
  modified_base 5: mod_base = OTHER; note = 2-fluororibose adenine
  modified_base 5..6: mod_base = OTHER; note = S-phosphorothioate
  modified_base 6: mod_base = OTHER; note = 2-fluororibose cytosine
  modified_base 6..7: mod_base = OTHER; note = S-phosphorothioate
  modified_base 7: mod_base = um
  modified_base 7..8: mod_base = OTHER; note = S-phosphorothioate
  modified_base 8: mod_base = OTHER; note = 2-fluororibose guanine
  modified_base 8..9: mod_base = OTHER; note = S-phosphorothioate
  modified_base 9: mod_base = OTHER; note = 2-fluororibose uracil
  modified_base 9..10: mod_base = OTHER; note = S-phosphorothioate
  modified_base 10: mod_base = gm
  modified_base 10..11: mod_base = OTHER; note = S-phosphorothioate
  modified_base 11: mod_base = OTHER; note = 2-fluororibose guanine
  modified_base 11..12: mod_base = OTHER; note = S-phosphorothioate
  modified_base 12: mod_base = cm
  modified_base 12..13: mod_base = OTHER; note = S-phosphorothioate
  modified_base 13: mod_base = OTHER; note = 2-O-methylribose adenine
  modified_base 13..14: mod_base = OTHER; note = S-phosphorothioate
  modified_base 14: mod_base = OTHER; note = 2-fluororibose cytosine
  modified_base 14..15: mod_base = OTHER; note R-N-(1,3-dimethylimidazolidin-2-ylidene)phosphoramidate
  modified_base 15: mod_base = OTHER; note = 2-fluororibose cytosine
  modified_base 15..16: mod_base = OTHER; note = S-phosphorothioate
  modified_base 16: mod_base = cm
  modified_base 16..17: mod_base = OTHER; note R-N-(1,3-dimethylimidazolidin-2-ylidene)phosphoramidate
  modified_base 17: mod_base = OTHER; note = 2-O-methylribose adenine
  modified_base 17..18: mod_base = OTHER; note = S-phosphorothioate
  modified_base 18: mod_base = gm
  modified_base 18..19: mod_base = OTHER; note = S-phosphorothioate
  modified_base 19: mod_base = OTHER; note = 2-O-methylribose adenine
  modified_base 19..20: mod_base = OTHER; note = S-phosphorothioate
  modified_base 20: mod_base = um
  modified_base 20..21: mod_base = OTHER; note = S-phosphorothioate
  modified_base 21: mod_base = um
  modified_base 21..22: mod_base = OTHER; note = S-phosphorothioate
  modified_base 22: mod_base = OTHER; note = 2-O-methylribose adenine
  modified_base 22..23: mod_base = OTHER; note = S-phosphorothioate
  modified_base 23: mod_base = um
  modified_base 23..24: mod_base = OTHER; note = S-phosphorothioate
  modified_base 24: mod_base = OTHER; note = 2-fluororibose cytosine
  modified_base 24..25: mod_base = OTHER; note = S-phosphorothioate
  modified_base 25: mod_base = OTHER; note = deoxyribose cytosine
  modified_base 25..26: mod_base = OTHER; note = S-phosphorothioate
  modified_base 26: mod_base = OTHER; note = deoxyribose adenine
  modified_base 26..27: mod_base = OTHER; note R-N-(1,3-dimethylimidazolidin-2-ylidene)phosphoramidate
  modified_base 27: mod_base = um
  modified_base 27..28: mod_base = OTHER; note = S-phosphorothioate
  modified_base 28: mod_base = gm
  modified_base 28..29: mod_base = OTHER; note = S-phosphorothioate
  modified_base 29: mod_base = um
  modified_base 29..30: mod_base = OTHER; note R-N-(1,3-dimethylimidazolidin-2-ylidene)phosphoramidate
  modified_base 30: mod_base = um
  source 1..30: mol_type = other RNA

SEQ ID NO: 706 - RNA, 30 nt, synthetic construct; identical to SEQ ID NO: 1
  misc_feature 1..30: note = Synthetic: WV-43985
  misc_feature 1..30: note = Synthetic: ADR-0100508
  modified_base 1: mod_base = OTHER; note = triantennary GalNAc with C12 linker linked to 6-aminohexanol linked by phosphate to the 5' end of 2-fluororibose adenine
  modified_base 1..2: mod_base = OTHER; note R-N-(1,3-dimethylimidazolidin-2-ylidene)phosphoramidate
  modified_base 2: mod_base = OTHER; note = 2-fluororibose uracil
  modified_base 2..3: mod_base = OTHER; note = S-phosphorothioate
  modified_base 3: mod_base = OTHER; note = 2-fluororibose cytosine
  modified_base 3..4: mod_base = OTHER; note = S-phosphorothioate
  modified_base 4: mod_base = OTHER; note = 2-fluororibose cytosine
  modified_base 4..5: mod_base = OTHER; note = S-phosphorothioate
  modified_base 5: mod_base = OTHER; note = 2-fluororibose adenine
  modified_base 5..6: mod_base = OTHER; note = S-phosphorothioate
  modified_base 6: mod_base = OTHER; note = 2-fluororibose cytosine
  modified_base 6..7: mod_base = OTHER; note R-N-(1,3-dimethylimidazolidin-2-ylidene)phosphoramidate
  modified_base 7: mod_base = um
  modified_base 7..8: mod_base = OTHER; note = S-phosphorothioate
  modified_base 8: mod_base = OTHER; note = 2-fluororibose guanine
  modified_base 8..9: mod_base = OTHER; note = S-phosphorothioate
  modified_base 9: mod_base = OTHER; note = 2-fluororibose uracil
  modified_base 9..10: mod_base = OTHER; note = S-phosphorothioate
  modified_base 10: mod_base = gm
  modified_base 11: mod_base = OTHER; note = 2-fluororibose guanine
  modified_base 11..12: mod_base = OTHER; note = S-phosphorothioate
  modified_base 12: mod_base = cm
  modified_base 13: mod_base = OTHER; note = 2-O-methylribose adenine
  modified_base 13..14: mod_base = OTHER; note = S-phosphorothioate
  modified_base 14: mod_base = OTHER; note = 2-fluororibose cytosine
  modified_base 14..15: mod_base = OTHER; note R-N-(1,3-dimethylimidazolidin-2-ylidene)phosphoramidate
  modified_base 15: mod_base = OTHER; note = 2-fluororibose cytosine
  modified_base 15..16: mod_base = OTHER; note = S-phosphorothioate
  modified_base 16: mod_base = cm
  modified_base 16..17: mod_base = OTHER; note R-N-(1,3-dimethylimidazolidin-2-ylidene)phosphoramidate
  modified_base 17: mod_base = OTHER; note = 2-O-methylribose adenine
  modified_base 17..18: mod_base = OTHER; note = S-phosphorothioate
  modified_base 18: mod_base = gm
  modified_base 18..19: mod_base = OTHER; note = S-phosphorothioate
  modified_base 19: mod_base = OTHER; note = 2-O-methylribose adenine
  modified_base 19..20: mod_base = OTHER; note = S-phosphorothioate
  modified_base 20: mod_base = um
  modified_base 20..21: mod_base = OTHER; note = S-phosphorothioate
  modified_base 21: mod_base = um
  modified_base 21..22: mod_base = OTHER; note = S-phosphorothioate
  modified_base 22: mod_base = OTHER; note = 2-O-methylribose adenine
  modified_base 22..23: mod_base = OTHER; note = S-phosphorothioate
  modified_base 23: mod_base = um
  modified_base 23..24: mod_base = OTHER; note = S-phosphorothioate
  modified_base 24: mod_base = OTHER; note = 2-fluororibose cytosine
  modified_base 24..25: mod_base = OTHER; note = S-phosphorothioate
  modified_base 25: mod_base = OTHER; note = deoxyribose cytosine
  modified_base 25..26: mod_base = OTHER; note = S-phosphorothioate
  modified_base 26: mod_base = OTHER; note = deoxyribose adenine
  modified_base 26..27: mod_base = OTHER; note R-N-(1,3-dimethylimidazolidin-2-ylidene)phosphoramidate
  modified_base 27: mod_base = um
  modified_base 27..28: mod_base = OTHER; note = S-phosphorothioate
  modified_base 28: mod_base = gm
  modified_base 28..29: mod_base = OTHER; note = S-phosphorothioate
  modified_base 29: mod_base = um
  modified_base 29..30: mod_base = OTHER; note R-N-(1,3-dimethylimidazolidin-2-ylidene)phosphoramidate
  modified_base 30: mod_base = um
  source 1..30: mol_type = other RNA

SEQ ID NO: 707 - RNA, 30 nt, synthetic construct; identical to SEQ ID NO: 1
  misc_feature 1..30: note = Synthetic: WV-43986
  misc_feature 1..30: note = Synthetic: ADR-0100509
  modified_base 1: mod_base = OTHER; note = triantennary GalNAc with C12 linker linked to 6-aminohexanol linked by phosphate to the 5' end of 2-fluororibose adenine
  modified_base 1..2: mod_base = OTHER; note R-N-(1,3-dimethylimidazolidin-2-ylidene)phosphoramidate
  modified_base 2: mod_base = OTHER; note = 2-fluororibose uracil
  modified_base 2..3: mod_base = OTHER; note = S-phosphorothioate
  modified_base 3: mod_base = OTHER; note = 2-fluororibose cytosine
  modified_base 3..4: mod_base = OTHER; note = S-phosphorothioate
  modified_base 4: mod_base = OTHER; note = 2-fluororibose cytosine
  modified_base 4..5: mod_base = OTHER; note = S-phosphorothioate
  modified_base 5: mod_base = OTHER; note = 2-fluororibose adenine
  modified_base 5..6: mod_base = OTHER; note = S-phosphorothioate
  modified_base 6: mod_base = OTHER; note = 2-fluororibose cytosine
  modified_base 6..7: mod_base = OTHER; note R-N-(1,3-dimethylimidazolidin-2-ylidene)phosphoramidate
  modified_base 7: mod_base = um
  modified_base 7..8: mod_base = OTHER; note = S-phosphorothioate
  modified_base 8: mod_base = OTHER; note = 2-fluororibose guanine
  modified_base 8..9: mod_base = OTHER; note = S-phosphorothioate
  modified_base 9: mod_base = OTHER; note = 2-fluororibose uracil
  modified_base 9..10: mod_base = OTHER; note = S-phosphorothioate
  modified_base 10: mod_base = gm
  modified_base 11: mod_base = OTHER; note = 2-fluororibose guanine
  modified_base 11..12: mod_base = OTHER; note = S-phosphorothioate
  modified_base 12: mod_base = cm
  modified_base 13: mod_base = OTHER; note = 2-O-methylribose adenine
  modified_base 13..14: mod_base = OTHER; note = S-phosphorothioate
  modified_base 14: mod_base = OTHER; note = 2-fluororibose cytosine
  modified_base 14..15: mod_base = OTHER; note R-N-(1,3-dimethylimidazolidin-2-ylidene)phosphoramidate
  modified_base 15: mod_base = OTHER; note = 2-fluororibose cytosine
  modified_base 15..16: mod_base = OTHER; note = S-phosphorothioate
  modified_base 16: mod_base = cm
  modified_base 16..17: mod_base = OTHER; note R-N-(1,3-dimethylimidazolidin-2-ylidene)phosphoramidate
  modified_base 17: mod_base = OTHER; note = 2-O-methylribose adenine
  modified_base 17..18: mod_base = OTHER; note = S-phosphorothioate
  modified_base 18: mod_base = gm
  modified_base 18..19: mod_base = OTHER; note = S-phosphorothioate
  modified_base 19: mod_base = OTHER; note = 2-O-methylribose adenine
  modified_base 20: mod_base = um
  modified_base 20..21: mod_base = OTHER; note = S-phosphorothioate
  modified_base 21: mod_base = um
  modified_base 21..22: mod_base = OTHER; note = S-phosphorothioate
  modified_base 22: mod_base = OTHER; note = 2-O-methylribose adenine
  modified_base 23: mod_base = um
  modified_base 23..24: mod_base = OTHER; note = S-phosphorothioate
  modified_base 24: mod_base = OTHER; note = 2-fluororibose cytosine
  modified_base 24..25: mod_base = OTHER; note = S-phosphorothioate
  modified_base 25: mod_base = OTHER; note = deoxyribose cytosine
  modified_base 25..26: mod_base = OTHER; note = S-phosphorothioate
  modified_base 26: mod_base = OTHER; note = deoxyribose adenine
  modified_base 26..27: mod_base = OTHER; note R-N-(1,3-dimethylimidazolidin-2-ylidene)phosphoramidate
  modified_base 27: mod_base = um
  modified_base 27..28: mod_base = OTHER; note = S-phosphorothioate
  modified_base 28: mod_base = gm
  modified_base 28..29: mod_base = OTHER; note = S-phosphorothioate
  modified_base 29: mod_base = um
  modified_base 29..30: mod_base = OTHER; note R-N-(1,3-dimethylimidazolidin-2-ylidene)phosphoramidate
  modified_base 30: mod_base = um
  source 1..30: mol_type = other RNA

SEQ ID NO: 708 - RNA, 30 nt, synthetic construct; identical to SEQ ID NO: 80
  misc_feature 1..30: note = Synthetic: WV-44176
  misc_feature 1..30: note = Synthetic: ADR-0104010
  modified_base 1: mod_base = cm
  modified_base 1..2: mod_base = OTHER; note R-N-(1,3-dimethylimidazolidin-2-ylidene)phosphoramidate
  modified_base 2: mod_base = cm
  modified_base 2..3: mod_base = OTHER; note = S-phosphorothioate
  modified_base 3: mod_base = cm
  modified_base 3..4: mod_base = OTHER; note = S-phosphorothioate
  modified_base 4: mod_base = OTHER; note = 2-fluororibose adenine
  modified_base 4..5: mod_base = OTHER; note = S-phosphorothioate
  modified_base 5: mod_base = OTHER; note = 2-fluororibose guanine
  modified_base 5..6: mod_base = OTHER; note = S-phosphorothioate
  modified_base 6: mod_base = OTHER; note = 2-fluororibose cytosine
  modified_base 6..7: mod_base = OTHER; note = S-phosphorothioate
  modified_base 7: mod_base = OTHER; note = 2-fluororibose adenine
  modified_base 7..8: mod_base = OTHER; note = S-phosphorothioate
  modified_base 8: mod_base = OTHER; note = 2-fluororibose guanine
  modified_base 8..9: mod_base = OTHER; note = S-phosphorothioate
  modified_base 9: mod_base = OTHER; note = 2-fluororibose cytosine
  modified_base 9..10: mod_base = OTHER; note = S-phosphorothioate
  modified_base 10: mod_base = OTHER; note = 2-fluororibose uracil
  modified_base 10..11: mod_base = OTHER; note = S-phosphorothioate
  modified_base 11: mod_base = OTHER; note = 2-fluororibose uracil
  modified_base 11..12: mod_base = OTHER; note = S-phosphorothioate
  modified_base 12: mod_base = OTHER; note = 2-fluororibose cytosine
  modified_base 12..13: mod_base = OTHER; note = S-phosphorothioate
  modified_base 13: mod_base = OTHER; note = 2-fluororibose adenine
  modified_base 13..14: mod_base = OTHER; note = S-phosphorothioate
  modified_base 14: mod_base = OTHER; note = 2-fluororibose guanine
  modified_base 14..15: mod_base = OTHER; note = S-phosphorothioate
  modified_base 15: mod_base = OTHER; note = 2-fluororibose uracil
  modified_base 15..16: mod_base = OTHER; note = S-phosphorothioate
  modified_base 16: mod_base = OTHER; note = 2-fluororibose cytosine
  modified_base 16..17: mod_base = OTHER; note = S-phosphorothioate
  modified_base 17: mod_base = OTHER; note = 2-fluororibose cytosine
  modified_base 17..18: mod_base = OTHER; note = S-phosphorothioate
  modified_base 18: mod_base = OTHER; note = 2-fluororibose cytosine
  modified_base 18..19: mod_base = OTHER; note = S-phosphorothioate
  modified_base 19: mod_base = OTHER; note = 2-fluororibose uracil
  modified_base 19..20: mod_base = OTHER; note = S-phosphorothioate
  modified_base 20: mod_base = OTHER; note = 2-fluororibose uracil
  modified_base 20..21: mod_base = OTHER; note = S-phosphorothioate
  modified_base 21: mod_base = OTHER; note = 2-fluororibose uracil
  modified_base 21..22: mod_base = OTHER; note = S-phosphorothioate
  modified_base 22: mod_base = OTHER; note = 2-fluororibose cytosine
  modified_base 22..23: mod_base = OTHER; note = S-phosphorothioate
  modified_base 23: mod_base = OTHER; note = 2-fluororibose uracil
  modified_base 23..24: mod_base = OTHER; note = S-phosphorothioate
  modified_base 24: mod_base = OTHER; note = arabinose cytosine
  modified_base 24..25: mod_base = OTHER; note = phosphorothioate
  modified_base 25: mod_base = OTHER; note = deoxyribose inosine
  modified_base 25..26: mod_base = OTHER; note S-N-(1,3-dimethylimidazolidin-2-ylidene)phosphoramidate
  modified_base 26: mod_base = um
  modified_base 26..27: mod_base = OTHER; note = S-phosphorothioate
  modified_base 27: mod_base = OTHER; note = 2-fluororibose cytosine
  modified_base 27..28: mod_base = OTHER; note = S-phosphorothioate
  modified_base 28: mod_base = gm
  modified_base 28..29: mod_base = OTHER; note = S-phosphorothioate
  modified_base 29: mod_base = OTHER; note = 2-O-methylribose adenine
  modified_base 29..30: mod_base = OTHER; note R-N-(1,3-dimethylimidazolidin-2-ylidene)phosphoramidate
  modified_base 30: mod_base = um
  source 1..30: mol_type = other RNA

SEQ ID NO: 709 - RNA, 30 nt, synthetic construct; identical to SEQ ID NO: 273
  misc_feature 1..30: note = Synthetic: WV-44177
  misc_feature 1..30: note = Synthetic: ADR-0104012
  modified_base 1: mod_base = cm
  modified_base 1..2: mod_base = OTHER; note R-N-(1,3-dimethylimidazolidin-2-ylidene)phosphoramidate
  modified_base 2: mod_base = cm
  modified_base 2..3: mod_base = OTHER; note = S-phosphorothioate
  modified_base 3: mod_base = cm
  modified_base 3..4: mod_base = OTHER; note = S-phosphorothioate
  modified_base 4: mod_base = OTHER; note = 2-fluororibose adenine
  modified_base 4..5: mod_base = OTHER; note = S-phosphorothioate
  modified_base 5: mod_base = OTHER; note = 2-fluororibose guanine
  modified_base 5..6: mod_base = OTHER; note = S-phosphorothioate
  modified_base 6: mod_base = OTHER; note = 2-fluororibose cytosine
  modified_base 6..7: mod_base = OTHER; note = S-phosphorothioate
  modified_base 7: mod_base = OTHER; note = 2-fluororibose adenine
  modified_base 7..8: mod_base = OTHER; note = S-phosphorothioate
  modified_base 8: mod_base = OTHER; note = 2-fluororibose guanine
  modified_base 8..9: mod_base = OTHER; note = S-phosphorothioate
  modified_base 9: mod_base = OTHER; note = 2-fluororibose cytosine
  modified_base 9..10: mod_base = OTHER; note = S-phosphorothioate
  modified_base 10: mod_base = OTHER; note = 2-fluororibose uracil
  modified_base 10..11: mod_base = OTHER; note = S-phosphorothioate
  modified_base 11: mod_base = OTHER; note = 2-fluororibose uracil
  modified_base 11..12: mod_base = OTHER; note = S-phosphorothioate
  modified_base 12: mod_base = OTHER; note = 2-fluororibose cytosine
  modified_base 12..13: mod_base = OTHER; note = S-phosphorothioate
  modified_base 13: mod_base = OTHER; note = 2-fluororibose adenine
  modified_base 13..14: mod_base = OTHER; note = S-phosphorothioate
  modified_base 14: mod_base = OTHER; note = 2-fluororibose guanine
  modified_base 14..15: mod_base = OTHER; note = S-phosphorothioate
  modified_base 15: mod_base = OTHER; note = 2-fluororibose uracil
  modified_base 15..16: mod_base = OTHER; note = S-phosphorothioate
  modified_base 16: mod_base = OTHER; note = 2-fluororibose cytosine
  modified_base 16..17: mod_base = OTHER; note = S-phosphorothioate
  modified_base 17: mod_base = OTHER; note = 2-fluororibose cytosine
  modified_base 17..18: mod_base = OTHER; note = S-phosphorothioate
  modified_base 18: mod_base = OTHER; note = 2-fluororibose cytosine
  modified_base 18..19: mod_base = OTHER; note = S-phosphorothioate
  modified_base 19: mod_base = OTHER; note = 2-fluororibose uracil
  modified_base 19..20: mod_base = OTHER; note = S-phosphorothioate
  modified_base 20: mod_base = OTHER; note = 2-fluororibose uracil
  modified_base 20..21: mod_base = OTHER; note = S-phosphorothioate
  modified_base 21: mod_base = OTHER; note = 2-fluororibose uracil
  modified_base 21..22: mod_base = OTHER; note = S-phosphorothioate
  modified_base 22: mod_base = OTHER; note = 2-fluororibose cytosine
  modified_base 22..23: mod_base = OTHER; note = S-phosphorothioate
  modified_base 23: mod_base = OTHER; note = 2-fluororibose uracil
  modified_base 23..24: mod_base = OTHER; note = S-phosphorothioate
  modified_base 24: mod_base = OTHER; note = deoxyribose uracil (position 3 connectivity)
  modified_base 24..25: mod_base = OTHER; note = S-phosphorothioate
  modified_base 25: mod_base = OTHER; note = deoxyribose inosine
  modified_base 25..26: mod_base = OTHER; note S-N-(1,3-dimethylimidazolidin-2-ylidene)phosphoramidate
  modified_base 26: mod_base = um
  modified_base 26..27: mod_base = OTHER; note = S-phosphorothioate
  modified_base 27: mod_base = OTHER; note = 2-fluororibose cytosine
  modified_base 27..28: mod_base = OTHER; note = S-phosphorothioate
  modified_base 28: mod_base = gm
  modified_base 28..29: mod_base = OTHER; note = S-phosphorothioate
  modified_base 29: mod_base = OTHER; note = 2-O-methylribose adenine
  modified_base 29..30: mod_base = OTHER; note R-N-(1,3-dimethylimidazolidin-2-ylidene)phosphoramidate
  modified_base 30: mod_base = um
  source 1..30: mol_type = other RNA

SEQ ID NO: 710 - RNA, 30 nt, synthetic construct; identical to SEQ ID NO: 273
  misc_feature 1..30: note = Synthetic: WV-44180
  misc_feature 1..30: note = Synthetic: ADR-0104049
  modified_base 1: mod_base = cm
  modified_base 1..2: mod_base = OTHER; note R-N-(1,3-dimethylimidazolidin-2-ylidene)phosphoramidate
  modified_base 2: mod_base = cm
  modified_base 2..3: mod_base = OTHER; note = S-phosphorothioate
  modified_base 3: mod_base = cm
  modified_base 3..4: mod_base = OTHER; note = S-phosphorothioate
  modified_base 4: mod_base = OTHER; note = 2-fluororibose adenine
  modified_base 4..5: mod_base = OTHER; note = S-phosphorothioate
  modified_base 5: mod_base = OTHER; note = 2-fluororibose guanine
  modified_base 5..6: mod_base = OTHER; note = S-phosphorothioate
  modified_base 6: mod_base = OTHER; note = 2-fluororibose cytosine
  modified_base 7: mod_base = OTHER; note = 2-fluororibose adenine
  modified_base 7..8: mod_base = OTHER; note = S-phosphorothioate
  modified_base 8: mod_base = OTHER; note = 2-fluororibose guanine
  modified_base 8..9: mod_base = OTHER; note = S-phosphorothioate
  modified_base 9: mod_base = OTHER; note = 2-fluororibose cytosine
  modified_base 9..10: mod_base = OTHER; note = S-phosphorothioate
  modified_base 10: mod_base = OTHER; note = 2-fluororibose uracil
  modified_base 10..11: mod_base = OTHER; note = S-phosphorothioate
  modified_base 11: mod_base = OTHER; note = 2-fluororibose uracil
  modified_base 11..12: mod_base = OTHER; note R-N-(1,3-dimethylimidazolidin-2-ylidene)phosphoramidate
  modified_base 12: mod_base = OTHER; note = 2-fluororibose cytosine
  modified_base 12..13: mod_base = OTHER; note = S-phosphorothioate
  modified_base 13: mod_base = OTHER; note = 2-fluororibose adenine
  modified_base 14: mod_base = OTHER; note = 2-fluororibose guanine
  modified_base 14..15: mod_base = OTHER; note R-N-(1,3-dimethylimidazolidin-2-ylidene)phosphoramidate
  modified_base 15: mod_base = OTHER; note = 2-fluororibose uracil
  modified_base 15..16: mod_base = OTHER; note = S-phosphorothioate
  modified_base 16: mod_base = OTHER; note = 2-fluororibose cytosine
  modified_base 16..17: mod_base = OTHER; note = S-phosphorothioate
  modified_base 17: mod_base = OTHER; note = 2-fluororibose cytosine
  modified_base 17..18: mod_base = OTHER; note = S-phosphorothioate
  modified_base 18: mod_base = OTHER; note = 2-fluororibose cytosine
  modified_base 18..19: mod_base = OTHER; note = S-phosphorothioate
  modified_base 19: mod_base = OTHER; note = 2-fluororibose uracil
  modified_base 19..20: mod_base = OTHER; note = S-phosphorothioate
  modified_base 20: mod_base = OTHER; note = 2-fluororibose uracil
  modified_base 20..21: mod_base = OTHER; note = S-phosphorothioate
  modified_base 21: mod_base = OTHER; note = 2-fluororibose uracil
  modified_base 21..22: mod_base = OTHER; note = S-phosphorothioate
  modified_base 22: mod_base = OTHER; note = 2-fluororibose cytosine
  modified_base 22..23: mod_base = OTHER; note = S-phosphorothioate
  modified_base 23: mod_base = OTHER; note = 2-fluororibose uracil
  modified_base 23..24: mod_base = OTHER; note = S-phosphorothioate
  modified_base 24: mod_base = OTHER; note = deoxyribose uracil (position 3 connectivity)
  modified_base 24..25: mod_base = OTHER; note = S-phosphorothioate
  modified_base 25: mod_base = OTHER; note = deoxyribose inosine
  modified_base 25..26: mod_base = OTHER; note S-N-(1,3-dimethylimidazolidin-2-ylidene)phosphoramidate
  modified_base 26: mod_base = um
  modified_base 27: mod_base = OTHER; note = 2-fluororibose cytosine
  modified_base 27..28: mod_base = OTHER; note = S-phosphorothioate
  modified_base 28: mod_base = gm
  modified_base 28..29: mod_base = OTHER; note = S-phosphorothioate
  modified_base 29: mod_base = OTHER; note = 2-O-methylribose adenine
  modified_base 29..30: mod_base = OTHER; note R-N-(1,3-dimethylimidazolidin-2-ylidene)phosphoramidate
  modified_base 30: mod_base = um
  source 1..30: mol_type = other RNA

SEQ ID NO: 711 - RNA, 30 nt, synthetic construct; identical to SEQ ID NO: 80
  misc_feature 1..30: note = Synthetic: WV-44211
  misc_feature 1..30: note = Synthetic: ADR-0104029
  modified_base 1: mod_base = cm
  modified_base 1..2: mod_base = OTHER; note R-N-(1,3-dimethylimidazolidin-2-ylidene)phosphoramidate
  modified_base 2: mod_base = cm
  modified_base 2..3: mod_base = OTHER; note = S-phosphorothioate
  modified_base 3: mod_base = cm
  modified_base 3..4: mod_base = OTHER; note = S-phosphorothioate
  modified_base 4: mod_base = OTHER; note = 2-fluororibose adenine
  modified_base 4..5: mod_base = OTHER; note = S-phosphorothioate
  modified_base 5: mod_base = OTHER; note = 2-fluororibose guanine
  modified_base 5..6: mod_base = OTHER; note = S-phosphorothioate
  modified_base 6: mod_base = OTHER; note = 2-fluororibose cytosine
  modified_base 6..7: mod_base = OTHER; note = S-phosphorothioate
  modified_base 7: mod_base = OTHER; note = 2-fluororibose adenine
  modified_base 7..8: mod_base = OTHER; note = S-phosphorothioate
  modified_base 8: mod_base = OTHER; note = 2-fluororibose guanine
  modified_base 8..9: mod_base = OTHER; note = S-phosphorothioate
  modified_base 9: mod_base = OTHER; note = 2-fluororibose cytosine
  modified_base 9..10: mod_base = OTHER; note = S-phosphorothioate
  modified_base 10: mod_base = OTHER; note = 2-fluororibose uracil
  modified_base 10..11: mod_base = OTHER; note = S-phosphorothioate
  modified_base 11: mod_base = OTHER; note = 2-fluororibose uracil
  modified_base 11..12: mod_base = OTHER; note R-N-(1,3-dimethylimidazolidin-2-ylidene)phosphoramidate
  modified_base 12: mod_base = OTHER; note = 2-fluororibose cytosine
  modified_base 12..13: mod_base = OTHER; note = S-phosphorothioate
  modified_base 13: mod_base = OTHER; note = 2-fluororibose adenine
  modified_base 13..14: mod_base = OTHER; note = S-phosphorothioate
  modified_base 14: mod_base = OTHER; note = 2-fluororibose guanine
  modified_base 14..15: mod_base = OTHER; note R-N-(1,3-dimethylimidazolidin-2-ylidene)phosphoramidate
  modified_base 15: mod_base = OTHER; note = 2-fluororibose uracil
  modified_base 15..16: mod_base = OTHER; note = S-phosphorothioate
  modified_base 16: mod_base = OTHER; note = 2-fluororibose cytosine
  modified_base 16..17: mod_base = OTHER; note = S-phosphorothioate
  modified_base 17: mod_base = OTHER; note = 2-fluororibose cytosine
  modified_base 17..18: mod_base = OTHER; note = S-phosphorothioate
  modified_base 18: mod_base = OTHER; note = 2-fluororibose cytosine
  modified_base 18..19: mod_base = OTHER; note = S-phosphorothioate
  modified_base 19: mod_base = OTHER; note = 2-fluororibose uracil
  modified_base 19..20: mod_base = OTHER; note = S-phosphorothioate
  modified_base 20: mod_base = OTHER; note = 2-fluororibose uracil
  modified_base 20..21: mod_base = OTHER; note = S-phosphorothioate
  modified_base 21: mod_base = OTHER; note = 2-fluororibose uracil
  modified_base 21..22: mod_base = OTHER; note = S-phosphorothioate
  modified_base 22: mod_base = OTHER; note = 2-fluororibose cytosine
  modified_base 22..23: mod_base = OTHER; note = S-phosphorothioate
  modified_base 23: mod_base = OTHER; note = 2-fluororibose uracil
  modified_base 23..24: mod_base = OTHER; note = S-phosphorothioate
  modified_base 24: mod_base = OTHER; note = arabinose cytosine
  modified_base 24..25: mod_base = OTHER; note = phosphorothioate
  modified_base 25: mod_base = OTHER; note = deoxyribose inosine
  modified_base 25..26: mod_base = OTHER; note S-N-(1,3-dimethylimidazolidin-2-ylidene)phosphoramidate
  modified_base 26: mod_base = um
  modified_base 26..27: mod_base = OTHER; note = S-phosphorothioate
  modified_base 27: mod_base = OTHER; note = 2-fluororibose cytosine
  modified_base 27..28: mod_base = OTHER; note = S-phosphorothioate
  modified_base 28: mod_base = gm
  modified_base 28..29: mod_base = OTHER; note = S-phosphorothioate
  modified_base 29: mod_base = OTHER; note = 2-O-methylribose adenine
  modified_base 29..30: mod_base = OTHER; note R-N-(1,3-dimethylimidazolidin-2-ylidene)phosphoramidate
  modified_base 30: mod_base = um
  source 1..30: mol_type = other RNA

SEQ ID NO: 712 - RNA, 30 nt, synthetic construct; identical to SEQ ID NO: 273
  misc_feature 1..30: note = Synthetic: WV-44212
  misc_feature 1..30: note = Synthetic: ADR-0104030
  modified_base 1: mod_base = cm
  modified_base 1..2: mod_base = OTHER; note R-N-(1,3-dimethylimidazolidin-2-ylidene)phosphoramidate
  modified_base 2: mod_base = cm
  modified_base 2..3: mod_base = OTHER; note = S-phosphorothioate
  modified_base 3: mod_base = cm
  modified_base 3..4: mod_base = OTHER; note = S-phosphorothioate
  modified_base 4: mod_base = OTHER; note = 2-fluororibose adenine
  modified_base 4..5: mod_base = OTHER; note = S-phosphorothioate
  modified_base 5: mod_base = OTHER; note = 2-fluororibose guanine
  modified_base 5..6: mod_base = OTHER; note = S-phosphorothioate
  modified_base 6: mod_base = OTHER; note = 2-fluororibose cytosine
  modified_base 6..7: mod_base = OTHER; note = S-phosphorothioate
  modified_base 7: mod_base = OTHER; note = 2-fluororibose adenine
  modified_base 7..8: mod_base = OTHER; note = S-phosphorothioate
  modified_base 8: mod_base = OTHER; note = 2-fluororibose guanine
  modified_base 8..9: mod_base = OTHER; note = S-phosphorothioate
  modified_base 9: mod_base = OTHER; note = 2-fluororibose cytosine
  modified_base 9..10: mod_base = OTHER; note = S-phosphorothioate
  modified_base 10: mod_base = OTHER; note = 2-fluororibose uracil
  modified_base 10..11: mod_base = OTHER; note = S-phosphorothioate
  modified_base 11: mod_base = OTHER; note = 2-fluororibose uracil
  modified_base 11..12: mod_base = OTHER; note R-N-(1,3-dimethylimidazolidin-2-ylidene)phosphoramidate
  modified_base 12: mod_base = OTHER; note = 2-fluororibose cytosine
  modified_base 12..13: mod_base = OTHER; note = S-phosphorothioate
  modified_base 13: mod_base = OTHER; note = 2-fluororibose adenine
  modified_base 13..14: mod_base = OTHER; note = S-phosphorothioate
  modified_base 14: mod_base = OTHER; note = 2-fluororibose guanine
  modified_base 14..15: mod_base = OTHER; note R-N-(1,3-dimethylimidazolidin-2-ylidene)phosphoramidate
  modified_base 15: mod_base = OTHER; note = 2-fluororibose uracil
  modified_base 15..16: mod_base = OTHER; note = S-phosphorothioate
  modified_base 16: mod_base = OTHER; note = 2-fluororibose cytosine
  modified_base 16..17: mod_base = OTHER; note = S-phosphorothioate
  modified_base 17: mod_base = OTHER; note = 2-fluororibose cytosine
  modified_base 17..18: mod_base = OTHER; note = S-phosphorothioate
  modified_base 18: mod_base = OTHER; note = 2-fluororibose cytosine
  modified_base 18..19: mod_base = OTHER; note = S-phosphorothioate
  modified_base 19: mod_base = OTHER; note = 2-fluororibose uracil
  modified_base 19..20: mod_base = OTHER; note = S-phosphorothioate
  modified_base 20: mod_base = OTHER; note = 2-fluororibose uracil
  modified_base 20..21: mod_base = OTHER; note = S-phosphorothioate
  modified_base 21: mod_base = OTHER; note = 2-fluororibose uracil
  modified_base 21..22: mod_base = OTHER; note = S-phosphorothioate
  modified_base 22: mod_base = OTHER; note = 2-fluororibose cytosine
  modified_base 22..23: mod_base = OTHER; note = S-phosphorothioate
  modified_base 23: mod_base = OTHER; note = 2-fluororibose uracil
  modified_base 23..24: mod_base = OTHER; note = S-phosphorothioate
  modified_base 24: mod_base = OTHER; note = deoxyribose uracil (position 3 connectivity)
  modified_base 24..25: mod_base = OTHER; note = S-phosphorothioate
  modified_base 25: mod_base = OTHER; note = deoxyribose inosine
  modified_base 25..26: mod_base = OTHER; note S-N-(1,3-dimethylimidazolidin-2-ylidene)phosphoramidate
  modified_base 26: mod_base = um
  modified_base 26..27: mod_base = OTHER; note = S-phosphorothioate
  modified_base 27: mod_base = OTHER; note = 2-fluororibose cytosine
  modified_base 27..28: mod_base = OTHER; note = S-phosphorothioate
  modified_base 28: mod_base = gm
  modified_base 28..29: mod_base = OTHER; note = S-phosphorothioate
  modified_base 29: mod_base = OTHER; note = 2-O-methylribose adenine
  modified_base 29..30: mod_base = OTHER; note R-N-(1,3-dimethylimidazolidin-2-ylidene)phosphoramidate
  modified_base 30: mod_base = um
  source 1..30: mol_type = other RNA

SEQ ID NO: 713 - RNA, 23 nt, synthetic construct
  misc_feature 1..23: note = Synthetic: WV-43144
  misc_feature 1..23: note = Synthetic: SSR-0105059
  modified_base 1: mod_base = um
  modified_base 1..2: mod_base = OTHER; note = phosphorothioate
  modified_base 2: mod_base = OTHER; note = 2-fluororibose adenine
  modified_base 2..3: mod_base = OTHER; note = phosphorothioate
  modified_base 3: mod_base = OTHER; note = 2-O-methylribose adenine
  modified_base 4: mod_base = gm
  modified_base 5: mod_base = gm
  modified_base 6: mod_base = OTHER; note = 2-fluororibose guanine
  modified_base 7: mod_base = OTHER; note = 2-O-methylribose adenine
  modified_base 8: mod_base = gm
  modified_base 9: mod_base = gm
  modified_base 10: mod_base = OTHER; note = 2-O-methylribose adenine
  modified_base 11: mod_base = OTHER; note = 2-O-methylribose adenine
  modified_base 12: mod_base = OTHER; note = 2-O-methylribose adenine
  modified_base 13: mod_base = um
  modified_base 14: mod_base = OTHER; note = 2-fluororibose adenine
  modified_base 15: mod_base = um
  modified_base 16: mod_base = OTHER; note = 2-fluororibose adenine
  modified_base 17: mod_base = gm
  modified_base 18: mod_base = OTHER; note = 2-O-methylribose adenine
  modified_base 19: mod_base = gm
  modified_base 20: mod_base = gm
  modified_base 21: mod_base = gm
  modified_base 21..22: mod_base = OTHER; note = phosphorothioate
  modified_base 22: mod_base = um
  modified_base 22..23: mod_base = OTHER; note = phosphorothioate
  modified_base 23: mod_base = um
  source 1..23: mol_type = other RNA
taagggaggaaatatagagggtt

SEQ ID NO: 714 - RNA, 30 nt, synthetic construct; identical to SEQ ID NO: 273
  misc_feature 1..30: note = Synthetic: WV-44192
  misc_feature 1..30: note = Synthetic: ADR-0104110
  modified_base 1: mod_base = cm
  modified_base 1..2: mod_base = OTHER; note R-N-(1,3-dimethylimidazolidin-2-ylidene)phosphoramidate
  modified_base 2: mod_base = cm
  modified_base 2..3: mod_base = OTHER; note = S-phosphorothioate
  modified_base 3: mod_base = cm
  modified_base 3..4: mod_base = OTHER; note = S-phosphorothioate
  modified_base 4: mod_base = OTHER; note = 2-fluororibose adenine
  modified_base 4..5: mod_base = OTHER; note = S-phosphorothioate
  modified_base 5: mod_base = OTHER; note = 2-fluororibose guanine
  modified_base 5..6: mod_base = OTHER; note = S-phosphorothioate
  modified_base 6: mod_base = cm
  modified_base 7: mod_base = OTHER; note = 2-fluororibose adenine
  modified_base 7..8: mod_base = OTHER; note = S-phosphorothioate
  modified_base 8: mod_base = OTHER; note = 2-fluororibose guanine
  modified_base 8..9: mod_base = OTHER; note = S-phosphorothioate
  modified_base 9: mod_base = OTHER; note = 2-fluororibose cytosine
  modified_base 9..10: mod_base = OTHER; note = S-phosphorothioate
  modified_base 10: mod_base = OTHER; note = 2-fluororibose uracil
  modified_base 10..11: mod_base = OTHER; note = S-phosphorothioate
  modified_base 11: mod_base = OTHER; note = 2-fluororibose uracil
  modified_base 11..12: mod_base = OTHER; note R-N-(1,3-dimethylimidazolidin-2-ylidene)phosphoramidate
  modified_base 12: mod_base = OTHER; note = 2-fluororibose cytosine
  modified_base 12..13: mod_base = OTHER; note = S-phosphorothioate
  modified_base 13: mod_base = OTHER; note = 2-fluororibose adenine
  modified_base 14: mod_base = OTHER; note = 2-fluororibose guanine
  modified_base 14..15: mod_base = OTHER; note R-N-(1,3-dimethylimidazolidin-2-ylidene)phosphoramidate
  modified_base 15: mod_base = OTHER; note = 2-fluororibose uracil
  modified_base 15..16: mod_base = OTHER; note = S-phosphorothioate
  modified_base 16: mod_base = OTHER; note = 2-fluororibose cytosine
  modified_base 17: mod_base = cm
  modified_base 17..18: mod_base = OTHER; note = S-phosphorothioate
  modified_base 18: mod_base = OTHER; note = 2-fluororibose cytosine
  modified_base 18..19: mod_base = OTHER; note = S-phosphorothioate
  modified_base 19: mod_base = OTHER; note = 2-fluororibose uracil
  modified_base 19..20: mod_base = OTHER; note = S-phosphorothioate
  modified_base 20: mod_base = OTHER; note = 2-fluororibose uracil
  modified_base 20..21: mod_base = OTHER; note = S-phosphorothioate
  modified_base 21: mod_base = OTHER; note = 2-fluororibose uracil
  modified_base 21..22: mod_base = OTHER; note = S-phosphorothioate
  modified_base 22: mod_base = OTHER; note = 2-fluororibose cytosine
  modified_base 22..23: mod_base = OTHER; note = S-phosphorothioate
  modified_base 23: mod_base = OTHER; note = 2-fluororibose uracil
  modified_base 23..24: mod_base = OTHER; note = S-phosphorothioate
  modified_base 24: mod_base = OTHER; note = deoxyribose uracil (position 3 connectivity)
  modified_base 24..25: mod_base = OTHER; note = S-phosphorothioate
  modified_base 25: mod_base = OTHER; note = deoxyribose inosine
  modified_base 25..26: mod_base = OTHER; note S-N-(1,3-dimethylimidazolidin-2-ylidene)phosphoramidate
  modified_base 26: mod_base = um
  modified_base 27: mod_base = OTHER; note = 2-fluororibose cytosine
  modified_base 27..28: mod_base = OTHER; note = S-phosphorothioate
  modified_base 28: mod_base = gm
  modified_base 28..29: mod_base = OTHER; note = S-phosphorothioate
  modified_base 29: mod_base = OTHER; note = 2-O-methylribose adenine
  modified_base 29..30: mod_base = OTHER; note R-N-(1,3-dimethylimidazolidin-2-ylidene)phosphoramidate
  modified_base 30: mod_base = um
  source 1..30: mol_type = other RNA

SEQ ID NO: 715 - RNA, 30 nt, synthetic construct; identical to SEQ ID NO: 273
  misc_feature 1..30: note = Synthetic: WV-44193
  misc_feature 1..30: note = Synthetic: ADR-0104106
  modified_base 1: mod_base = cm
  modified_base 1..2: mod_base = OTHER; note R-N-(1,3-dimethylimidazolidin-2-ylidene)phosphoramidate
  modified_base 2: mod_base = cm
  modified_base 2..3: mod_base = OTHER; note = S-phosphorothioate
  modified_base 3: mod_base = cm
  modified_base 3..4: mod_base = OTHER; note = S-phosphorothioate
  modified_base 4: mod_base = OTHER; note = 2-fluororibose adenine
  modified_base 4..5: mod_base = OTHER; note = S-phosphorothioate
  modified_base 5: mod_base = OTHER; note = 2-fluororibose guanine
  modified_base 5..6: mod_base = OTHER; note = S-phosphorothioate
  modified_base 6: mod_base = cm
  modified_base 7: mod_base = OTHER; note = 2-fluororibose adenine
  modified_base 7..8: mod_base = OTHER; note = S-phosphorothioate
  modified_base 8: mod_base = OTHER; note = 2-fluororibose guanine
  modified_base 8..9: mod_base = OTHER; note = S-phosphorothioate
  modified_base 9: mod_base = OTHER; note = 2-fluororibose cytosine
  modified_base 9..10: mod_base = OTHER; note = S-phosphorothioate
  modified_base 10: mod_base = OTHER; note = 2-fluororibose uracil
  modified_base 10..11: mod_base = OTHER; note = S-phosphorothioate
  modified_base 11: mod_base = OTHER; note = 2-fluororibose uracil
  modified_base 11..12: mod_base = OTHER; note R-N-(1,3-dimethylimidazolidin-2-ylidene)phosphoramidate
  modified_base 12: mod_base = OTHER; note = 2-fluororibose cytosine
  modified_base 12..13: mod_base = OTHER; note = S-phosphorothioate
  modified_base 13: mod_base = OTHER; note = 2-fluororibose adenine
  modified_base 14: mod_base = OTHER; note = 2-fluororibose guanine
  modified_base 14..15: mod_base = OTHER; note R-N-(1,3-dimethylimidazolidin-2-ylidene)phosphoramidate
  modified_base 15: mod_base = OTHER; note = 2-fluororibose uracil
  modified_base 15..16: mod_base = OTHER; note = S-phosphorothioate
  modified_base 16: mod_base = OTHER; note = 2-fluororibose cytosine
  modified_base 16..17: mod_base = OTHER; note = S-phosphorothioate
  modified_base 17: mod_base = OTHER; note = 2-fluororibose cytosine
  modified_base 17..18: mod_base = OTHER; note = S-phosphorothioate
  modified_base 18: mod_base = OTHER; note = 2-fluororibose cytosine
  modified_base 18..19: mod_base = OTHER; note = S-phosphorothioate
  modified_base 19: mod_base = OTHER; note = 2-fluororibose uracil
  modified_base 19..20: mod_base = OTHER; note = S-phosphorothioate
  modified_base 20: mod_base = um
  modified_base 21: mod_base = OTHER; note = 2-fluororibose uracil
  modified_base 21..22: mod_base = OTHER; note = S-phosphorothioate
  modified_base 22: mod_base = OTHER; note = 2-fluororibose cytosine
  modified_base 22..23: mod_base = OTHER; note = S-phosphorothioate
  modified_base 23: mod_base = OTHER; note = 2-fluororibose uracil
  modified_base 23..24: mod_base = OTHER; note = S-phosphorothioate
  modified_base 24: mod_base = OTHER; note = deoxyribose uracil (position 3 connectivity)
  modified_base 24..25: mod_base = OTHER; note = S-phosphorothioate
  modified_base 25: mod_base = OTHER; note = deoxyribose inosine
  modified_base 25..26: mod_base = OTHER; note S-N-(1,3-dimethylimidazolidin-2-ylidene)phosphoramidate
  modified_base 26: mod_base = um
  modified_base 27: mod_base = OTHER; note = 2-fluororibose cytosine
  modified_base 27..28: mod_base = OTHER; note = S-phosphorothioate
  modified_base 28: mod_base = gm
  modified_base 28..29: mod_base = OTHER; note = S-phosphorothioate
  modified_base 29: mod_base = OTHER; note = 2-O-methylribose adenine
  modified_base 29..30: mod_base = OTHER; note R-N-(1,3-dimethylimidazolidin-2-ylidene)phosphoramidate
  modified_base 30: mod_base = um
  source 1..30: mol_type = other RNA

SEQ ID NO: 716 - RNA, 30 nt, synthetic construct; identical to SEQ ID NO: 273
  misc_feature 1..30: note = Synthetic: WV-44194
  misc_feature 1..30: note = Synthetic: ADR-0104112
  modified_base 1: mod_base = cm
  modified_base 1..2: mod_base = OTHER; note R-N-(1,3-dimethylimidazolidin-2-ylidene)phosphoramidate
  modified_base 2: mod_base = cm
  modified_base 2..3: mod_base = OTHER; note = S-phosphorothioate
  modified_base 3: mod_base = cm
  modified_base 3..4: mod_base = OTHER; note = S-phosphorothioate
  modified_base 4: mod_base = OTHER; note = 2-fluororibose adenine
  modified_base 4..5: mod_base = OTHER; note = S-phosphorothioate
  modified_base 5: mod_base = OTHER; note = 2-fluororibose guanine
  modified_base 5..6: mod_base = OTHER; note = S-phosphorothioate
  modified_base 6: mod_base = cm
  modified_base 7: mod_base = OTHER; note = 2-fluororibose adenine
  modified_base 7..8: mod_base = OTHER; note = S-phosphorothioate
  modified_base 8: mod_base = OTHER; note = 2-fluororibose guanine
  modified_base 8..9: mod_base = OTHER; note = S-phosphorothioate
  modified_base 9: mod_base = OTHER; note = 2-fluororibose cytosine
  modified_base 9..10: mod_base = OTHER; note = S-phosphorothioate
  modified_base 10: mod_base = OTHER; note = 2-fluororibose uracil
  modified_base 10..11: mod_base = OTHER; note = S-phosphorothioate
  modified_base 11: mod_base = OTHER; note = 2-fluororibose uracil
  modified_base 11..12: mod_base = OTHER; note R-N-(1,3-dimethylimidazolidin-2-ylidene)phosphoramidate
  modified_base 12: mod_base = OTHER; note = 2-fluororibose cytosine
  modified_base 12..13: mod_base = OTHER; note = S-phosphorothioate
  modified_base 13: mod_base = OTHER; note = 2-fluororibose adenine
  modified_base 14: mod_base = OTHER; note = 2-fluororibose guanine
  modified_base 14..15: mod_base = OTHER; note R-N-(1,3-dimethylimidazolidin-2-ylidene)phosphoramidate
  modified_base 15: mod_base = OTHER; note = 2-fluororibose uracil
  modified_base 15..16: mod_base = OTHER; note = S-phosphorothioate
  modified_base 16: mod_base = OTHER; note = 2-fluororibose cytosine
  modified_base 17: mod_base = cm
  modified_base 17..18: mod_base = OTHER; note = S-phosphorothioate
  modified_base 18: mod_base = OTHER; note = 2-fluororibose cytosine
  modified_base 18..19: mod_base = OTHER; note = S-phosphorothioate
  modified_base 19: mod_base = OTHER; note = 2-fluororibose uracil
  modified_base 19..20: mod_base = OTHER; note = S-phosphorothioate
  modified_base 20: mod_base = um
  modified_base 21: mod_base = OTHER; note = 2-fluororibose uracil
  modified_base 21..22: mod_base = OTHER; note = S-phosphorothioate
  modified_base 22: mod_base = OTHER; note = 2-fluororibose cytosine
  modified_base 22..23: mod_base = OTHER; note = S-phosphorothioate
  modified_base 23: mod_base = OTHER; note = 2-fluororibose uracil
  modified_base 23..24: mod_base = OTHER; note = S-phosphorothioate
  modified_base 24: mod_base = OTHER; note = deoxyribose uracil (position 3 connectivity)
  modified_base 24..25: mod_base = OTHER; note = S-phosphorothioate
  modified_base 25: mod_base = OTHER; note = deoxyribose inosine
  modified_base 25..26: mod_base = OTHER; note S-N-(1,3-dimethylimidazolidin-2-ylidene)phosphoramidate
  modified_base 26: mod_base = um
  modified_base 27: mod_base = OTHER; note = 2-fluororibose cytosine
  modified_base 27..28: mod_base = OTHER; note = S-phosphorothioate
  modified_base 28: mod_base = gm
  modified_base 28..29: mod_base = OTHER; note = S-phosphorothioate
  modified_base 29: mod_base = OTHER; note = 2-O-methylribose adenine
  modified_base 29..30: mod_base = OTHER; note R-N-(1,3-dimethylimidazolidin-2-ylidene)phosphoramidate
  modified_base 30: mod_base = um
  source 1..30: mol_type = other RNA

SEQ ID NO: 717 - RNA, 30 nt, synthetic construct; identical to SEQ ID NO: 273
  misc_feature 1..30: note = Synthetic: WV-44195
  misc_feature 1..30: note = Synthetic: ADR-0104114
  modified_base 1: mod_base = cm
  modified_base 1..2: mod_base = OTHER; note R-N-(1,3-dimethylimidazolidin-2-ylidene)phosphoramidate
  modified_base 2: mod_base = cm
  modified_base 2..3: mod_base = OTHER; note = S-phosphorothioate
  modified_base 3: mod_base = cm
  modified_base 3..4: mod_base = OTHER; note = S-phosphorothioate
  modified_base 4: mod_base = OTHER; note = 2-fluororibose adenine
  modified_base 4..5: mod_base = OTHER; note = S-phosphorothioate
  modified_base 5: mod_base = OTHER; note = 2-fluororibose guanine
  modified_base 5..6: mod_base = OTHER; note = S-phosphorothioate
  modified_base 6: mod_base = cm
  modified_base 7: mod_base = OTHER; note = 2-fluororibose adenine
  modified_base 7..8: mod_base = OTHER; note = S-phosphorothioate
  modified_base 8: mod_base = OTHER; note = 2-fluororibose guanine
  modified_base 8..9: mod_base = OTHER; note = S-phosphorothioate
  modified_base 9: mod_base = OTHER; note = 2-fluororibose cytosine
  modified_base 9..10: mod_base = OTHER; note = S-phosphorothioate
  modified_base 10: mod_base = OTHER; note = 2-fluororibose uracil
  modified_base 10..11: mod_base = OTHER; note = S-phosphorothioate
  modified_base 11: mod_base = OTHER; note = 2-fluororibose uracil
  modified_base 11..12: mod_base = OTHER; note R-N-(1,3-dimethylimidazolidin-2-ylidene)phosphoramidate
  modified_base 12: mod_base = OTHER; note = 2-fluororibose cytosine
  modified_base 12..13: mod_base = OTHER; note = S-phosphorothioate
  modified_base 13: mod_base = OTHER; note = 2-fluororibose adenine
  modified_base 14: mod_base = OTHER; note = 2-fluororibose guanine
  modified_base 14..15: mod_base = OTHER; note R-N-(1,3-dimethylimidazolidin-2-ylidene)phosphoramidate
  modified_base 15: mod_base = OTHER; note = 2-fluororibose uracil
  modified_base 15..16: mod_base = OTHER; note = S-phosphorothioate
  modified_base 16: mod_base = OTHER; note = 2-fluororibose cytosine
  modified_base 17: mod_base = cm
  modified_base 17..18: mod_base = OTHER; note = S-phosphorothioate
  modified_base 18: mod_base = OTHER; note = 2-fluororibose cytosine
  modified_base 18..19: mod_base = OTHER; note = S-phosphorothioate
  modified_base 19: mod_base = OTHER; note = 2-fluororibose uracil
  modified_base 19..20: mod_base = OTHER; note R-N-(1,3-dimethylimidazolidin-2-ylidene)phosphoramidate
  modified_base 20: mod_base = um
  modified_base 21: mod_base = OTHER; note = 2-fluororibose uracil
  modified_base 21..22: mod_base = OTHER; note = S-phosphorothioate
  modified_base 22: mod_base = OTHER; note = 2-fluororibose cytosine
  modified_base 22..23: mod_base = OTHER; note = S-phosphorothioate
  modified_base 23: mod_base = OTHER; note = 2-fluororibose uracil
  modified_base 23..24: mod_base = OTHER; note = S-phosphorothioate
  modified_base 24: mod_base = OTHER; note = deoxyribose uracil (position 3 connectivity)
  modified_base 24..25: mod_base = OTHER; note = S-phosphorothioate
  modified_base 25: mod_base = OTHER; note = deoxyribose inosine
  modified_base 25..26: mod_base = OTHER; note S-N-(1,3-dimethylimidazolidin-2-ylidene)phosphoramidate
  modified_base 26: mod_base = um
  modified_base 27: mod_base = OTHER; note = 2-fluororibose cytosine
  modified_base 27..28: mod_base = OTHER; note = S-phosphorothioate
  modified_base 28: mod_base = gm
  modified_base 28..29: mod_base = OTHER; note = S-phosphorothioate
  modified_base 29: mod_base = OTHER; note = 2-O-methylribose adenine
  modified_base 29..30: mod_base = OTHER; note R-N-(1,3-dimethylimidazolidin-2-ylidene)phosphoramidate
  modified_base 30: mod_base = um
  source 1..30: mol_type = other RNA

SEQ ID NO: 718 - RNA, 30 nt, synthetic construct; identical to SEQ ID NO: 273
  misc_feature 1..30: note = Synthetic: WV-44196
  misc_feature 1..30: note = Synthetic: ADR-0104052
  modified_base 1: mod_base = cm
  modified_base 1..2: mod_base = OTHER; note R-N-(1,3-dimethylimidazolidin-2-ylidene)phosphoramidate
  modified_base 2: mod_base = cm
  modified_base 2..3: mod_base = OTHER; note = S-phosphorothioate
  modified_base 3: mod_base = cm
  modified_base 3..4: mod_base = OTHER; note = S-phosphorothioate
  modified_base 4: mod_base = OTHER; note = 2-fluororibose adenine
  modified_base 4..5: mod_base = OTHER; note = S-phosphorothioate
  modified_base 5: mod_base = OTHER; note = 2-fluororibose guanine
  modified_base 5..6: mod_base = OTHER; note = S-phosphorothioate
  modified_base 6: mod_base = OTHER; note = 2-fluororibose cytosine
  modified_base 7: mod_base = OTHER; note = 2-fluororibose adenine
  modified_base 7..8: mod_base = OTHER; note = S-phosphorothioate
  modified_base 8: mod_base = OTHER; note = 2-fluororibose guanine
  modified_base 8..9: mod_base = OTHER; note = S-phosphorothioate
  modified_base 9: mod_base = OTHER; note = 2-fluororibose cytosine
  modified_base 9..10: mod_base = OTHER; note = S-phosphorothioate
  modified_base 10: mod_base = OTHER; note = 2-fluororibose uracil
  modified_base 10..11: mod_base = OTHER; note = S-phosphorothioate
  modified_base 11: mod_base = OTHER; note = 2-fluororibose uracil
  modified_base 11..12: mod_base = OTHER; note R-N-(1,3-dimethylimidazolidin-2-ylidene)phosphoramidate
  modified_base 12: mod_base = OTHER; note = 2-fluororibose cytosine
  modified_base 12..13: mod_base = OTHER; note = S-phosphorothioate
  modified_base 13: mod_base = OTHER; note = 2-fluororibose adenine
  modified_base 14: mod_base = OTHER; note = 2-fluororibose guanine
  modified_base 14..15: mod_base = OTHER; note R-N-(1,3-dimethylimidazolidin-2-ylidene)phosphoramidate
  modified_base 15: mod_base = OTHER; note = 2-fluororibose uracil
  modified_base 15..16: mod_base = OTHER; note = S-phosphorothioate
  modified_base 16: mod_base = OTHER; note = 2-fluororibose cytosine
  modified_base 17: mod_base = OTHER; note = 2-fluororibose cytosine
  modified_base 17..18: mod_base = OTHER; note = S-phosphorothioate
  modified_base 18: mod_base = OTHER; note = 2-fluororibose cytosine
  modified_base 18..19: mod_base = OTHER; note = S-phosphorothioate
  modified_base 19: mod_base = OTHER; note = 2-fluororibose uracil
  modified_base 19..20: mod_base = OTHER; note R-N-(1,3-dimethylimidazolidin-2-ylidene)phosphoramidate
  modified_base 20: mod_base = OTHER; note = 2-fluororibose uracil
  modified_base 21: mod_base = OTHER; note = 2-fluororibose uracil
  modified_base 21..22: mod_base = OTHER; note = S-phosphorothioate
  modified_base 22: mod_base = OTHER; note = 2-fluororibose cytosine
  modified_base 22..23: mod_base = OTHER; note = S-phosphorothioate
  modified_base 23: mod_base = OTHER; note = 2-fluororibose uracil
  modified_base 23..24: mod_base = OTHER; note = S-phosphorothioate
  modified_base 24: mod_base = OTHER; note = deoxyribose uracil (position 3 connectivity)
  modified_base 24..25: mod_base = OTHER; note = S-phosphorothioate
  modified_base 25: mod_base = OTHER; note = deoxyribose inosine
  modified_base 25..26: mod_base = OTHER; note S-N-(1,3-dimethylimidazolidin-2-ylidene)phosphoramidate
  modified_base 26: mod_base = um
  modified_base 27: mod_base = OTHER; note = 2-fluororibose cytosine
  modified_base 27..28: mod_base = OTHER; note = S-phosphorothioate
  modified_base 28: mod_base = gm
  modified_base 28..29: mod_base = OTHER; note = S-phosphorothioate
  modified_base 29: mod_base = OTHER; note = 2-O-methylribose adenine
  modified_base 29..30: mod_base = OTHER; note R-N-(1,3-dimethylimidazolidin-2-ylidene)phosphoramidate
  modified_base 30: mod_base = um
  source 1..30: mol_type = other RNA

SEQ ID NO: 719 - RNA, 30 nt, synthetic construct; identical to SEQ ID NO: 273
  misc_feature 1..30: note = Synthetic: WV-44197
  misc_feature 1..30: note = Synthetic: ADR-0104047
  modified_base 1: mod_base = cm
  modified_base 1..2: mod_base = OTHER; note R-N-(1,3-dimethylimidazolidin-2-ylidene)phosphoramidate
  modified_base 2: mod_base = cm
  modified_base 2..3: mod_base = OTHER; note = S-phosphorothioate
  modified_base 3: mod_base = cm
  modified_base 3..4: mod_base = OTHER; note = S-phosphorothioate
  modified_base 4: mod_base = OTHER; note = 2-fluororibose adenine
  modified_base 4..5: mod_base = OTHER; note = S-phosphorothioate
  modified_base 5: mod_base = OTHER; note = 2-fluororibose guanine
  modified_base 5..6: mod_base = OTHER; note = S-phosphorothioate
  modified_base 6: mod_base = OTHER; note = 2-fluororibose cytosine
  modified_base 7: mod_base = OTHER; note = 2-fluororibose adenine
  modified_base 7..8: mod_base = OTHER; note = S-phosphorothioate
  modified_base 8: mod_base = OTHER; note = 2-fluororibose guanine
  modified_base 8..9: mod_base = OTHER; note = S-phosphorothioate
  modified_base 9: mod_base = OTHER; note = 2-fluororibose cytosine
  modified_base 9..10: mod_base = OTHER; note = S-phosphorothioate
  modified_base 10: mod_base = OTHER; note = 2-fluororibose uracil
  modified_base 10..11: mod_base = OTHER; note = S-phosphorothioate
  modified_base 11: mod_base = OTHER; note = 2-fluororibose uracil
  modified_base 11..12: mod_base = OTHER; note R-N-(1,3-dimethylimidazolidin-2-ylidene)phosphoramidate
  modified_base 12: mod_base = OTHER; note = 2-fluororibose cytosine
  modified_base 12..13: mod_base = OTHER; note = S-phosphorothioate
  modified_base 13: mod_base = OTHER; note = 2-fluororibose adenine
  modified_base 14: mod_base = OTHER; note = 2-fluororibose guanine
  modified_base 14..15: mod_base = OTHER; note = S-phosphorothioate
  modified_base 15: mod_base = OTHER; note = 2-fluororibose uracil
  modified_base 15..16: mod_base = OTHER; note = S-phosphorothioate
  modified_base 16: mod_base = OTHER; note = 2-fluororibose cytosine
  modified_base 17: mod_base = OTHER; note = 2-fluororibose cytosine
  modified_base 17..18: mod_base = OTHER; note = S-phosphorothioate
  modified_base 18: mod_base = OTHER; note = 2-fluororibose cytosine
  modified_base 18..19: mod_base = OTHER; note = S-phosphorothioate
  modified_base 19: mod_base = OTHER; note = 2-fluororibose uracil
  modified_base 19..20: mod_base = OTHER; note R-N-(1,3-dimethylimidazolidin-2-ylidene)phosphoramidate
  modified_base 20: mod_base = OTHER; note = 2-fluororibose uracil
  modified_base 21: mod_base = OTHER; note = 2-fluororibose uracil
  modified_base 21..22: mod_base = OTHER; note = S-phosphorothioate
  modified_base 22: mod_base = OTHER; note = 2-fluororibose cytosine
  modified_base 22..23: mod_base = OTHER; note = S-phosphorothioate
  modified_base 23: mod_base = OTHER; note = 2-fluororibose uracil
  modified_base 23..24: mod_base = OTHER; note = S-phosphorothioate
  modified_base 24: mod_base = OTHER; note = deoxyribose uracil (position 3 connectivity)
  modified_base 24..25: mod_base = OTHER; note = S-phosphorothioate
  modified_base 25: mod_base = OTHER; note = deoxyribose inosine
  modified_base 25..26: mod_base = OTHER; note S-N-(1,3-dimethylimidazolidin-2-ylidene)phosphoramidate
  modified_base 26: mod_base = um
  modified_base 27: mod_base = OTHER; note = 2-fluororibose cytosine
  modified_base 27..28: mod_base = OTHER; note = S-phosphorothioate
  modified_base 28: mod_base = gm
  modified_base 28..29: mod_base = OTHER; note = S-phosphorothioate
  modified_base 29: mod_base = OTHER; note = 2-O-methylribose adenine
  modified_base 29..30: mod_base = OTHER; note R-N-(1,3-dimethylimidazolidin-2-ylidene)phosphoramidate
  modified_base 30: mod_base = um
  source 1..30: mol_type = other RNA

SEQ ID NO: 720 - RNA, 30 nt, synthetic construct; identical to SEQ ID NO: 134
  misc_feature 1..30: note = Synthetic: WV-44228
  misc_feature 1..30: note = Synthetic: ADR-0104037
  modified_base 1: mod_base = cm
  modified_base 1..2: mod_base = OTHER; note R-N-(1,3-dimethylimidazolidin-2-ylidene)phosphoramidate
  modified_base 2: mod_base = cm
  modified_base 2..3: mod_base = OTHER; note = S-phosphorothioate
  modified_base 3: mod_base = cm
  modified_base 3..4: mod_base = OTHER; note = S-phosphorothioate
  modified_base 4: mod_base = OTHER; note = 2-fluororibose adenine
  modified_base 4..5: mod_base = OTHER; note = S-phosphorothioate
  modified_base 5: mod_base = OTHER; note = 2-fluororibose guanine
  modified_base 5..6: mod_base = OTHER; note = S-phosphorothioate
  modified_base 6: mod_base = OTHER; note = 2-fluororibose cytosine
  modified_base 6..7: mod_base = OTHER; note = S-phosphorothioate
  modified_base 7: mod_base = OTHER; note = 2-fluororibose adenine
  modified_base 7..8: mod_base = OTHER; note = S-phosphorothioate
  modified_base 8: mod_base = OTHER; note = 2-fluororibose guanine
  modified_base 8..9: mod_base = OTHER; note = S-phosphorothioate
  modified_base 9: mod_base = OTHER; note = 2-fluororibose cytosine
  modified_base 9..10: mod_base = OTHER; note = S-phosphorothioate
  modified_base 10: mod_base = OTHER; note = 2-fluororibose uracil
  modified_base 10..11: mod_base = OTHER; note = S-phosphorothioate
  modified_base 11: mod_base = OTHER; note = 2-fluororibose uracil
  modified_base 11..12: mod_base = OTHER; note R-N-(1,3-dimethylimidazolidin-2-ylidene)phosphoramidate
  modified_base 12: mod_base = OTHER; note = 2-fluororibose cytosine
  modified_base 12..13: mod_base = OTHER; note = S-phosphorothioate
  modified_base 13: mod_base = OTHER; note = 2-fluororibose adenine
  modified_base 13..14: mod_base = OTHER; note R-N-(1,3-dimethylimidazolidin-2-ylidene)phosphoramidate
  modified_base 14: mod_base = OTHER; note = 2-fluororibose guanine
  modified_base 14..15: mod_base = OTHER; note = S-phosphorothioate
  modified_base 15: mod_base = OTHER; note = 2-fluororibose uracil
  modified_base 15..16: mod_base = OTHER; note = S-phosphorothioate
  modified_base 16: mod_base = OTHER; note = 2-fluororibose cytosine
  modified_base 16..17: mod_base = OTHER; note = S-phosphorothioate
  modified_base 17: mod_base = OTHER; note = 2-fluororibose cytosine
  modified_base 18: mod_base = OTHER; note = 2-fluororibose cytosine
  modified_base 18..19: mod_base = OTHER; note R-N-(1,3-dimethylimidazolidin-2-ylidene)phosphoramidate
  modified_base 19: mod_base = OTHER; note = 2-fluororibose uracil
  modified_base 20: mod_base = OTHER; note = 2-fluororibose uracil
  modified_base 20..21: mod_base = OTHER; note R-N-(1,3-dimethylimidazolidin-2-ylidene)phosphoramidate
  modified_base 21: mod_base = OTHER; note = 2-fluororibose uracil
  modified_base 21..22: mod_base = OTHER; note = S-phosphorothioate
  modified_base 22: mod_base = OTHER; note = 2-fluororibose cytosine
  modified_base 22..23: mod_base = OTHER; note = S-phosphorothioate
  modified_base 23: mod_base = OTHER; note = 2-fluororibose uracil
  modified_base 23..24: mod_base = OTHER; note = S-phosphorothioate
  modified_base 24: mod_base = OTHER; note = deoxyribose 6-amino-9-substituted 8,9-dihydro-7H-purin-8-one
  modified_base 24..25: mod_base = OTHER; note = S-phosphorothioate
  modified_base 25: mod_base = OTHER; note = deoxyribose inosine
  modified_base 25..26: mod_base = OTHER; note S-N-(1,3-dimethylimidazolidin-2-ylidene)phosphoramidate
  modified_base 26: mod_base = um
  modified_base 26..27: mod_base = OTHER; note = S-phosphorothioate
  modified_base 27: mod_base = OTHER; note = 2-fluororibose cytosine
  modified_base 27..28: mod_base = OTHER; note = S-phosphorothioate
  modified_base 28: mod_base = gm
  modified_base 28..29: mod_base = OTHER; note = S-phosphorothioate
  modified_base 29: mod_base = OTHER; note = 2-O-methylribose adenine
  modified_base 29..30: mod_base = OTHER; note R-N-(1,3-dimethylimidazolidin-2-ylidene)phosphoramidate
  modified_base 30: mod_base = um
  source 1..30: mol_type = other RNA

SEQ ID NO: 721 - RNA, 30 nt, synthetic construct; identical to SEQ ID NO: 134
  misc_feature 1..30: note = Synthetic: WV-44229
  misc_feature 1..30: note = Synthetic: ADR-0104034
  modified_base 1: mod_base = cm
  modified_base 1..2: mod_base = OTHER; note R-N-(1,3-dimethylimidazolidin-2-ylidene)phosphoramidate
  modified_base 2: mod_base = cm
  modified_base 2..3: mod_base = OTHER; note = S-phosphorothioate
  modified_base 3: mod_base = cm
  modified_base 3..4: mod_base = OTHER; note = S-phosphorothioate
  modified_base 4: mod_base = OTHER; note = 2-fluororibose adenine
  modified_base 4..5: mod_base = OTHER; note = S-phosphorothioate
  modified_base 5: mod_base = OTHER; note = 2-fluororibose guanine
  modified_base 5..6: mod_base = OTHER; note = S-phosphorothioate
  modified_base 6: mod_base = OTHER; note = 2-fluororibose cytosine
  modified_base 6..7: mod_base = OTHER; note = S-phosphorothioate
  modified_base 7: mod_base = OTHER; note = 2-fluororibose adenine
  modified_base 7..8: mod_base = OTHER; note = S-phosphorothioate
  modified_base 8: mod_base = OTHER; note = 2-fluororibose guanine
  modified_base 8..9: mod_base = OTHER; note = S-phosphorothioate
  modified_base 9: mod_base = OTHER; note = 2-fluororibose cytosine
  modified_base 9..10: mod_base = OTHER; note = S-phosphorothioate
  modified_base 10: mod_base = OTHER; note = 2-fluororibose uracil
  modified_base 10..11: mod_base = OTHER; note = S-phosphorothioate
  modified_base 11: mod_base = OTHER; note = 2-fluororibose uracil
  modified_base 11..12: mod_base = OTHER; note R-N-(1,3-dimethylimidazolidin-2-ylidene)phosphoramidate
  modified_base 12: mod_base = OTHER; note = 2-fluororibose cytosine
  modified_base 12..13: mod_base = OTHER; note = S-phosphorothioate
  modified_base 13: mod_base = OTHER; note = 2-fluororibose adenine
  modified_base 13..14: mod_base = OTHER; note = S-phosphorothioate
  modified_base 14: mod_base = OTHER; note = 2-fluororibose guanine
  modified_base 14..15: mod_base = OTHER; note R-N-(1,3-dimethylimidazolidin-2-ylidene)phosphoramidate
  modified_base 15: mod_base = OTHER; note = 2-fluororibose uracil
  modified_base 15..16: mod_base = OTHER; note = S-phosphorothioate
  modified_base 16: mod_base = OTHER; note = 2-fluororibose cytosine
  modified_base 16..17: mod_base = OTHER; note = S-phosphorothioate
  modified_base 17: mod_base = OTHER; note = 2-fluororibose cytosine
  modified_base 18: mod_base = OTHER; note = 2-fluororibose cytosine
  modified_base 18..19: mod_base = OTHER; note R-N-(1,3-dimethylimidazolidin-2-ylidene)phosphoramidate
  modified_base 19: mod_base = OTHER; note = 2-fluororibose uracil
  modified_base 20: mod_base = OTHER; note = 2-fluororibose uracil
  modified_base 20..21: mod_base = OTHER; note R-N-(1,3-dimethylimidazolidin-2-ylidene)phosphoramidate
  modified_base 21: mod_base = OTHER; note = 2-fluororibose uracil
  modified_base 21..22: mod_base = OTHER; note = S-phosphorothioate
  modified_base 22: mod_base = OTHER; note = 2-fluororibose cytosine
  modified_base 22..23: mod_base = OTHER; note = S-phosphorothioate
  modified_base 23: mod_base = OTHER; note = 2-fluororibose uracil
  modified_base 23..24: mod_base = OTHER; note = S-phosphorothioate
  modified_base 24: mod_base = OTHER; note = deoxyribose 6-amino-9-substituted 8,9-dihydro-7H-purin-8-one
  modified_base 24..25: mod_base = OTHER; note = S-phosphorothioate
  modified_base 25: mod_base = OTHER; note = deoxyribose inosine
  modified_base 25..26: mod_base = OTHER; note S-N-(1,3-dimethylimidazolidin-2-ylidene)phosphoramidate
  modified_base 26: mod_base = um
  modified_base 26..27: mod_base = OTHER; note = S-phosphorothioate
  modified_base 27: mod_base = OTHER; note = 2-fluororibose cytosine
  modified_base 27..28: mod_base = OTHER; note = S-phosphorothioate
  modified_base 28: mod_base = gm
  modified_base 28..29: mod_base = OTHER; note = S-phosphorothioate
  modified_base 29: mod_base = OTHER; note = 2-O-methylribose adenine
  modified_base 29..30: mod_base = OTHER; note R-N-(1,3-dimethylimidazolidin-2-ylidene)phosphoramidate
  modified_base 30: mod_base = um
  source 1..30: mol_type = other RNA

SEQ ID NO: 722 - RNA, 30 nt, synthetic construct; identical to SEQ ID NO: 134
  misc_feature 1..30: note = Synthetic: WV-44220
  misc_feature 1..30: note = Synthetic: ADR-0103998
  modified_base 1: mod_base = cm
  modified_base 1..2: mod_base = OTHER; note R-N-(1,3-dimethylimidazolidin-2-ylidene)phosphoramidate
  modified_base 2: mod_base = cm
  modified_base 2..3: mod_base = OTHER; note = S-phosphorothioate
  modified_base 3: mod_base = cm
  modified_base 3..4: mod_base = OTHER; note = S-phosphorothioate
  modified_base 4: mod_base = OTHER; note = 2-fluororibose adenine
  modified_base 4..5: mod_base = OTHER; note = S-phosphorothioate
  modified_base 5: mod_base = OTHER; note = 2-fluororibose guanine
  modified_base 5..6: mod_base = OTHER; note = S-phosphorothioate
  modified_base 6: mod_base = OTHER; note = 2-fluororibose cytosine
  modified_base 6..7: mod_base = OTHER; note = R-phosphorothioate
  modified_base 7: mod_base = OTHER; note = 2-fluororibose adenine
  modified_base 7..8: mod_base = OTHER; note = S-phosphorothioate
  modified_base 8: mod_base = OTHER; note = 2-fluororibose guanine
  modified_base 8..9: mod_base = OTHER; note = S-phosphorothioate
  modified_base 9: mod_base = OTHER; note = 2-fluororibose cytosine
  modified_base 9..10: mod_base = OTHER; note = S-phosphorothioate
  modified_base 10: mod_base = OTHER; note = 2-fluororibose uracil
  modified_base 10..11: mod_base = OTHER; note = S-phosphorothioate
  modified_base 11: mod_base = OTHER; note = 2-fluororibose uracil
  modified_base 11..12: mod_base = OTHER; note R-N-(1,3-dimethylimidazolidin-2-ylidene)phosphoramidate
  modified_base 12: mod_base = OTHER; note = 2-fluororibose cytosine
  modified_base 12..13: mod_base = OTHER; note = S-phosphorothioate
  modified_base 13: mod_base = OTHER; note = 2-fluororibose adenine
  modified_base 13..14: mod_base = OTHER; note R-N-(1,3-dimethylimidazolidin-2-ylidene)phosphoramidate
  modified_base 14: mod_base = OTHER; note = 2-fluororibose guanine
  modified_base 14..15: mod_base = OTHER; note = S-phosphorothioate
  modified_base 15: mod_base = OTHER; note = 2-fluororibose uracil
  modified_base 15..16: mod_base = OTHER; note = S-phosphorothioate
  modified_base 16: mod_base = OTHER; note = 2-fluororibose cytosine
  modified_base 16..17: mod_base = OTHER; note = S-phosphorothioate
  modified_base 17: mod_base = OTHER; note = 2-fluororibose cytosine
  modified_base 17..18: mod_base = OTHER; note = R-phosphorothioate
  modified_base 18: mod_base = OTHER; note = 2-fluororibose cytosine
  modified_base 18..19: mod_base = OTHER; note = S-phosphorothioate
  modified_base 19: mod_base = OTHER; note = 2-fluororibose uracil
  modified_base 19..20: mod_base = OTHER; note = S-phosphorothioate
  modified_base 20: mod_base = OTHER; note = 2-fluororibose uracil
  modified_base 20..21: mod_base = OTHER; note = S-phosphorothioate
  modified_base 21: mod_base = OTHER; note = 2-fluororibose uracil
  modified_base 21..22: mod_base = OTHER; note = S-phosphorothioate
  modified_base 22: mod_base = OTHER; note = 2-fluororibose cytosine
  modified_base 22..23: mod_base = OTHER; note = S-phosphorothioate
  modified_base 23: mod_base = OTHER; note = 2-fluororibose uracil
  modified_base 23..24: mod_base = OTHER; note = S-phosphorothioate
  modified_base 24: mod_base = OTHER; note = deoxyribose 6-amino-9-substituted 8,9-dihydro-7H-purin-8-one
  modified_base 24..25: mod_base = OTHER; note = S-phosphorothioate
  modified_base 25: mod_base = OTHER; note = deoxyribose inosine
  modified_base 25..26: mod_base = OTHER; note S-N-(1,3-dimethylimidazolidin-2-ylidene)phosphoramidate
  modified_base 26: mod_base = um
  modified_base 26..27: mod_base = OTHER; note = S-phosphorothioate
  modified_base 27: mod_base = OTHER; note = 2-fluororibose cytosine
  modified_base 27..28: mod_base = OTHER; note = S-phosphorothioate
  modified_base 28: mod_base = gm
  modified_base 28..29: mod_base = OTHER; note = S-phosphorothioate
  modified_base 29: mod_base = OTHER; note = 2-O-methylribose adenine
  modified_base 29..30: mod_base = OTHER; note R-N-(1,3-dimethylimidazolidin-2-ylidene)phosphoramidate
  modified_base 30: mod_base = um
  source 1..30: mol_type = other RNA

SEQ ID NO: 723 - RNA, 30 nt, synthetic construct; identical to SEQ ID NO: 134
  misc_feature 1..30: note = Synthetic: WV-44221
  misc_feature 1..30: note = Synthetic: ADR-0103997
  modified_base 1: mod_base = cm
  modified_base 1..2: mod_base = OTHER; note R-N-(1,3-dimethylimidazolidin-2-ylidene)phosphoramidate
  modified_base 2: mod_base = cm
  modified_base 2..3: mod_base = OTHER; note = S-phosphorothioate
  modified_base 3: mod_base = cm
  modified_base 3..4: mod_base = OTHER; note = S-phosphorothioate
  modified_base 4: mod_base = OTHER; note = 2-fluororibose adenine
  modified_base 4..5: mod_base = OTHER; note = S-phosphorothioate
  modified_base 5: mod_base = OTHER; note = 2-fluororibose guanine
  modified_base 5..6: mod_base = OTHER; note = S-phosphorothioate
  modified_base 6: mod_base = OTHER; note = 2-fluororibose cytosine
  modified_base 6..7: mod_base = OTHER; note = R-phosphorothioate
  modified_base 7: mod_base = OTHER; note = 2-fluororibose adenine
  modified_base 7..8: mod_base = OTHER; note = S-phosphorothioate
  modified_base 8: mod_base = OTHER; note = 2-fluororibose guanine
  modified_base 8..9: mod_base = OTHER; note = S-phosphorothioate
  modified_base 9: mod_base = OTHER; note = 2-fluororibose cytosine
  modified_base 9..10: mod_base = OTHER; note = S-phosphorothioate
  modified_base 10: mod_base = OTHER; note = 2-fluororibose uracil
  modified_base 10..11: mod_base = OTHER; note = S-phosphorothioate
  modified_base 11: mod_base = OTHER; note = 2-fluororibose uracil
  modified_base 11..12: mod_base = OTHER; note R-N-(1,3-dimethylimidazolidin-2-ylidene)phosphoramidate
  modified_base 12: mod_base = OTHER; note = 2-fluororibose cytosine
  modified_base 12..13: mod_base = OTHER; note = S-phosphorothioate
  modified_base 13: mod_base = OTHER; note = 2-fluororibose adenine
  modified_base 13..14: mod_base = OTHER; note = S-phosphorothioate
  modified_base 14: mod_base = OTHER; note = 2-fluororibose guanine
  modified_base 14..15: mod_base = OTHER; note R-N-(1,3-dimethylimidazolidin-2-ylidene)phosphoramidate
  modified_base 15: mod_base = OTHER; note = 2-fluororibose uracil
  modified_base 15..16: mod_base = OTHER; note = S-phosphorothioate
  modified_base 16: mod_base = OTHER; note = 2-fluororibose cytosine
  modified_base 16..17: mod_base = OTHER; note = S-phosphorothioate
  modified_base 17: mod_base = OTHER; note = 2-fluororibose cytosine
  modified_base 17..18: mod_base = OTHER; note = S-phosphorothioate
  modified_base 18: mod_base = OTHER; note = 2-fluororibose cytosine
  modified_base 18..19: mod_base = OTHER; note = S-phosphorothioate
  modified_base 19: mod_base = OTHER; note = 2-fluororibose uracil
  modified_base 19..20: mod_base = OTHER; note = S-phosphorothioate
  modified_base 20: mod_base = OTHER; note = 2-fluororibose uracil
  modified_base 20..21: mod_base = OTHER; note = S-phosphorothioate
  modified_base 21: mod_base = OTHER; note = 2-fluororibose uracil
  modified_base 21..22: mod_base = OTHER; note = S-phosphorothioate
  modified_base 22: mod_base = OTHER; note = 2-fluororibose cytosine
  modified_base 22..23: mod_base = OTHER; note = S-phosphorothioate
  modified_base 23: mod_base = OTHER; note = 2-fluororibose uracil
  modified_base 23..24: mod_base = OTHER; note = S-phosphorothioate
  modified_base 24: mod_base = OTHER; note = deoxyribose 6-amino-9-substituted 8,9-dihydro-7H-purin-8-one
  modified_base 24..25: mod_base = OTHER; note = S-phosphorothioate
  modified_base 25: mod_base = OTHER; note = deoxyribose inosine
  modified_base 25..26: mod_base = OTHER; note S-N-(1,3-dimethylimidazolidin-2-ylidene)phosphoramidate
  modified_base 26: mod_base = um
  modified_base 26..27: mod_base = OTHER; note = S-phosphorothioate
  modified_base 27: mod_base = OTHER; note = 2-fluororibose cytosine
  modified_base 27..28: mod_base = OTHER; note = S-phosphorothioate
  modified_base 28: mod_base = gm
  modified_base 28..29: mod_base = OTHER; note = S-phosphorothioate
  modified_base 29: mod_base = OTHER; note = 2-O-methylribose adenine
  modified_base 29..30: mod_base = OTHER; note R-N-(1,3-dimethylimidazolidin-2-ylidene)phosphoramidate
  modified_base 30: mod_base = um
  source 1..30: mol_type = other RNA

SEQ ID NO: 724 - RNA, 30 nt, synthetic construct; identical to SEQ ID NO: 134
  misc_feature 1..30: note = Synthetic: WV-44478
  misc_feature 1..30: note = Synthetic: ADR-0104063
  modified_base 1: mod_base = cm
  modified_base 1..2: mod_base = OTHER; note R-N-(1,3-dimethylimidazolidin-2-ylidene)phosphoramidate
  modified_base 2: mod_base = cm
  modified_base 2..3: mod_base = OTHER; note = S-phosphorothioate
  modified_base 3: mod_base = cm
  modified_base 3..4: mod_base = OTHER; note = S-phosphorothioate
  modified_base 4: mod_base = OTHER; note = 2-fluororibose adenine
  modified_base 4..5: mod_base = OTHER; note = S-phosphorothioate
  modified_base 5: mod_base = OTHER; note = 2-fluororibose guanine
  modified_base 5..6: mod_base = OTHER; note = S-phosphorothioate
  modified_base 6: mod_base = OTHER; note = 2-fluororibose cytosine
  modified_base 7: mod_base = OTHER; note = 2-O-methylribose adenine
  modified_base 7..8: mod_base = OTHER; note = S-phosphorothioate
  modified_base 8: mod_base = OTHER; note = 2-fluororibose guanine
  modified_base 8..9: mod_base = OTHER; note = S-phosphorothioate
  modified_base 9: mod_base = OTHER; note = 2-fluororibose cytosine
  modified_base 10: mod_base = um
  modified_base 10..11: mod_base = OTHER; note = S-phosphorothioate
  modified_base 11: mod_base = OTHER; note = 2-fluororibose uracil
  modified_base 11..12: mod_base = OTHER; note R-N-(1,3-dimethylimidazolidin-2-ylidene)phosphoramidate
  modified_base 12: mod_base = cm
  modified_base 13: mod_base = OTHER; note = 2-fluororibose adenine
  modified_base 13..14: mod_base = OTHER; note = S-phosphorothioate
  modified_base 14: mod_base = OTHER; note = 2-fluororibose guanine
  modified_base 14..15: mod_base = OTHER; note R-N-(1,3-dimethylimidazolidin-2-ylidene)phosphoramidate
  modified_base 15: mod_base = OTHER; note = 2-fluororibose uracil
  modified_base 16: mod_base = cm
  modified_base 16..17: mod_base = OTHER; note = S-phosphorothioate
  modified_base 17: mod_base = OTHER; note = 2-fluororibose cytosine
  modified_base 17..18: mod_base = OTHER; note = S-phosphorothioate
  modified_base 18: mod_base = OTHER; note = 2-fluororibose cytosine
  modified_base 18..19: mod_base = OTHER; note = S-phosphorothioate
  modified_base 19: mod_base = OTHER; note = 2-fluororibose uracil
  modified_base 19..20: mod_base = OTHER; note R-N-(1,3-dimethylimidazolidin-2-ylidene)phosphoramidate
  modified_base 20: mod_base = OTHER; note = 2-fluororibose uracil
  modified_base 20..21: mod_base = OTHER; note = S-phosphorothioate
  modified_base 21: mod_base = um
  modified_base 22: mod_base = OTHER; note = 2-fluororibose cytosine
  modified_base 22..23: mod_base = OTHER; note = S-phosphorothioate
  modified_base 23: mod_base = OTHER; note = deoxyribose thymine
  modified_base 23..24: mod_base = OTHER; note = S-phosphorothioate
  modified_base 24: mod_base = OTHER; note = deoxyribose 6-amino-9-substituted 8,9-dihydro-7H-purin-8-one
  modified_base 24..25: mod_base = OTHER; note = S-phosphorothioate
  modified_base 25: mod_base = OTHER; note = deoxyribose inosine
  modified_base 25..26: mod_base = OTHER; note S-N-(1,3-dimethylimidazolidin-2-ylidene)phosphoramidate
  modified_base 26: mod_base = um
  modified_base 27: mod_base = OTHER; note = 2-fluororibose cytosine
  modified_base 27..28: mod_base = OTHER; note = S-phosphorothioate
  modified_base 28: mod_base = gm
  modified_base 28..29: mod_base = OTHER; note = S-phosphorothioate
  modified_base 29: mod_base = OTHER; note = 2-O-methylribose adenine
  modified_base 29..30: mod_base = OTHER; note R-N-(1,3-dimethylimidazolidin-2-ylidene)phosphoramidate
  modified_base 30: mod_base = um
  source 1..30: mol_type = other RNA

SEQ ID NO: 725 - RNA, 30 nt, synthetic construct; identical to SEQ ID NO: 273
  misc_feature 1..30: note = Synthetic: WV-44476
  misc_feature 1..30: note = Synthetic: ADR-0104059
  modified_base 1: mod_base = cm
  modified_base 1..2: mod_base = OTHER; note R-N-(1,3-dimethylimidazolidin-2-ylidene)phosphoramidate
  modified_base 2: mod_base = cm
  modified_base 2..3: mod_base = OTHER; note = S-phosphorothioate
  modified_base 3: mod_base = cm
  modified_base 3..4: mod_base = OTHER; note = S-phosphorothioate
  modified_base 4: mod_base = OTHER; note = 2-fluororibose adenine
  modified_base 4..5: mod_base = OTHER; note = S-phosphorothioate
  modified_base 5: mod_base = OTHER; note = 2-fluororibose guanine
  modified_base 5..6: mod_base = OTHER; note = S-phosphorothioate
  modified_base 6: mod_base = OTHER; note = 2-fluororibose cytosine
  modified_base 7: mod_base = OTHER; note = 2-O-methylribose adenine
  modified_base 7..8: mod_base = OTHER; note = S-phosphorothioate
  modified_base 8: mod_base = OTHER; note = 2-fluororibose guanine
  modified_base 8..9: mod_base = OTHER; note = S-phosphorothioate
  modified_base 9: mod_base = OTHER; note = 2-fluororibose cytosine
  modified_base 10: mod_base = um
  modified_base 10..11: mod_base = OTHER; note = S-phosphorothioate
  modified_base 11: mod_base = OTHER; note = 2-fluororibose uracil
  modified_base 11..12: mod_base = OTHER; note R-N-(1,3-dimethylimidazolidin-2-ylidene)phosphoramidate
  modified_base 12: mod_base = cm
  modified_base 13: mod_base = OTHER; note = 2-fluororibose adenine
  modified_base 13..14: mod_base = OTHER; note = S-phosphorothioate
  modified_base 14: mod_base = OTHER; note = 2-fluororibose guanine
  modified_base 14..15: mod_base = OTHER; note R-N-(1,3-dimethylimidazolidin-2-ylidene)phosphoramidate
  modified_base 15: mod_base = OTHER; note = 2-fluororibose uracil
  modified_base 16: mod_base = cm
  modified_base 16..17: mod_base = OTHER; note = S-phosphorothioate
  modified_base 17: mod_base = OTHER; note = 2-fluororibose cytosine
  modified_base 17..18: mod_base = OTHER; note = S-phosphorothioate
  modified_base 18: mod_base = OTHER; note = 2-fluororibose cytosine
  modified_base 18..19: mod_base = OTHER; note = S-phosphorothioate
  modified_base 19: mod_base = OTHER; note = 2-fluororibose uracil
  modified_base 19..20: mod_base = OTHER; note R-N-(1,3-dimethylimidazolidin-2-ylidene)phosphoramidate
  modified_base 20: mod_base = OTHER; note = 2-fluororibose uracil
  modified_base 20..21: mod_base = OTHER; note = S-phosphorothioate
  modified_base 21: mod_base = um
  modified_base 22: mod_base = OTHER; note = 2-fluororibose cytosine
  modified_base 22..23: mod_base = OTHER; note = S-phosphorothioate
  modified_base 23: mod_base = OTHER; note = 2-fluororibose uracil
  modified_base 23..24: mod_base = OTHER; note = S-phosphorothioate
  modified_base 24: mod_base = OTHER; note = deoxyribose uracil (position 3 connectivity)
  modified_base 24..25: mod_base = OTHER; note = S-phosphorothioate
  modified_base 25: mod_base = OTHER; note = deoxyribose inosine
  modified_base 25..26: mod_base = OTHER; note S-N-(1,3-dimethylimidazolidin-2-ylidene)phosphoramidate
  modified_base 26: mod_base = um
  modified_base 27: mod_base = OTHER; note = 2-fluororibose cytosine
  modified_base 27..28: mod_base = OTHER; note = S-phosphorothioate
  modified_base 28: mod_base = gm
  modified_base 28..29: mod_base = OTHER; note = S-phosphorothioate
  modified_base 29: mod_base = OTHER; note = 2-O-methylribose adenine
  modified_base 29..30: mod_base = OTHER; note R-N-(1,3-dimethylimidazolidin-2-ylidene)phosphoramidate
  modified_base 30: mod_base = um
  source 1..30: mol_type = other RNA

SEQ ID NO: 726 - RNA, 30 nt, synthetic construct; identical to SEQ ID NO: 273
  misc_feature 1..30: note = Synthetic: WV-44479
  misc_feature 1..30: note = Synthetic: ADR-0104062
  modified_base 1: mod_base = cm
  modified_base 1..2: mod_base = OTHER; note R-N-(1,3-dimethylimidazolidin-2-ylidene)phosphoramidate
  modified_base 2: mod_base = cm
  modified_base 2..3: mod_base = OTHER; note = S-phosphorothioate
  modified_base 3: mod_base = cm
  modified_base 3..4: mod_base = OTHER; note = S-phosphorothioate
  modified_base 4: mod_base = OTHER; note = 2-fluororibose adenine
  modified_base 4..5: mod_base = OTHER; note = S-phosphorothioate
  modified_base 5: mod_base = OTHER; note = 2-fluororibose guanine
  modified_base 5..6: mod_base = OTHER; note = S-phosphorothioate
  modified_base 6: mod_base = OTHER; note = 2-fluororibose cytosine
  modified_base 7: mod_base = OTHER; note = 2-O-methylribose adenine
  modified_base 7..8: mod_base = OTHER; note = S-phosphorothioate
  modified_base 8: mod_base = OTHER; note = 2-fluororibose guanine
  modified_base 8..9: mod_base = OTHER; note = S-phosphorothioate
  modified_base 9: mod_base = OTHER; note = 2-fluororibose cytosine
  modified_base 10: mod_base = um
  modified_base 10..11: mod_base = OTHER; note = S-phosphorothioate
  modified_base 11: mod_base = OTHER; note = 2-fluororibose uracil
  modified_base 11..12: mod_base = OTHER; note R-N-(1,3-dimethylimidazolidin-2-ylidene)phosphoramidate
  modified_base 12: mod_base = cm
  modified_base 13: mod_base = OTHER; note = 2-fluororibose adenine
  modified_base 13..14: mod_base = OTHER; note = S-phosphorothioate
  modified_base 14: mod_base = OTHER; note = 2-fluororibose guanine
  modified_base 14..15: mod_base = OTHER; note R-N-(1,3-dimethylimidazolidin-2-ylidene)phosphoramidate
  modified_base 15: mod_base = OTHER; note = 2-fluororibose uracil
  modified_base 16: mod_base = cm
  modified_base 16..17: mod_base = OTHER; note = S-phosphorothioate
  modified_base 17: mod_base = OTHER; note = 2-fluororibose cytosine
  modified_base 17..18: mod_base = OTHER; note = S-phosphorothioate
  modified_base 18: mod_base = OTHER; note = 2-fluororibose cytosine
  modified_base 18..19: mod_base = OTHER; note = S-phosphorothioate
  modified_base 19: mod_base = OTHER; note = 2-fluororibose uracil
  modified_base 19..20: mod_base = OTHER; note R-N-(1,3-dimethylimidazolidin-2-ylidene)phosphoramidate
  modified_base 20: mod_base = OTHER; note = 2-fluororibose uracil
  modified_base 20..21: mod_base = OTHER; note = S-phosphorothioate
  modified_base 21: mod_base = um
  modified_base 22: mod_base = OTHER; note = 2-fluororibose cytosine
  modified_base 22..23: mod_base = OTHER; note = S-phosphorothioate
  modified_base 23: mod_base = OTHER; note = deoxyribose thymine
  modified_base 23..24: mod_base = OTHER; note = S-phosphorothioate
  modified_base 24: mod_base = OTHER; note = deoxyribose uracil (position 3 connectivity)
  modified_base 24..25: mod_base = OTHER; note = S-phosphorothioate
  modified_base 25: mod_base = OTHER; note = deoxyribose inosine
  modified_base 25..26: mod_base = OTHER; note S-N-(1,3-dimethylimidazolidin-2-ylidene)phosphoramidate
  modified_base 26: mod_base = um
  modified_base 27: mod_base = OTHER; note = 2-fluororibose cytosine
  modified_base 27..28: mod_base = OTHER; note = S-phosphorothioate
  modified_base 28: mod_base = gm
  modified_base 28..29: mod_base = OTHER; note = S-phosphorothioate
  modified_base 29: mod_base = OTHER; note = 2-O-methylribose adenine
  modified_base 29..30: mod_base = OTHER; note R-N-(1,3-dimethylimidazolidin-2-ylidene)phosphoramidate
  modified_base 30: mod_base = um
  source 1..30: mol_type = other RNA

SEQ ID NO: 727 - RNA, 30 nt, synthetic construct; identical to SEQ ID NO: 80
  misc_feature 1..30: note = Synthetic: WV-44477
  misc_feature 1..30: note = Synthetic: ADR-0104057
  modified_base 1: mod_base = cm
  modified_base 1..2: mod_base = OTHER; note R-N-(1,3-dimethylimidazolidin-2-ylidene)phosphoramidate
  modified_base 2: mod_base = cm
  modified_base 2..3: mod_base = OTHER; note = S-phosphorothioate
  modified_base 3: mod_base = cm
  modified_base 3..4: mod_base = OTHER; note = S-phosphorothioate
  modified_base 4: mod_base = OTHER; note = 2-fluororibose adenine
  modified_base 4..5: mod_base = OTHER; note = S-phosphorothioate
  modified_base 5: mod_base = OTHER; note = 2-fluororibose guanine
  modified_base 5..6: mod_base = OTHER; note = S-phosphorothioate
  modified_base 6: mod_base = OTHER; note = 2-fluororibose cytosine
  modified_base 7: mod_base = OTHER; note = 2-O-methylribose adenine
  modified_base 7..8: mod_base = OTHER; note = S-phosphorothioate
  modified_base 8: mod_base = OTHER; note = 2-fluororibose guanine
  modified_base 8..9: mod_base = OTHER; note = S-phosphorothioate
  modified_base 9: mod_base = OTHER; note = 2-fluororibose cytosine
  modified_base 10: mod_base = um
  modified_base 10..11: mod_base = OTHER; note = S-phosphorothioate
  modified_base 11: mod_base = OTHER; note = 2-fluororibose uracil
  modified_base 11..12: mod_base = OTHER; note R-N-(1,3-dimethylimidazolidin-2-ylidene)phosphoramidate
  modified_base 12: mod_base = cm
  modified_base 13: mod_base = OTHER; note = 2-fluororibose adenine
  modified_base 13..14: mod_base = OTHER; note = S-phosphorothioate
  modified_base 14: mod_base = OTHER; note = 2-fluororibose guanine
  modified_base 14..15: mod_base = OTHER; note R-N-(1,3-dimethylimidazolidin-2-ylidene)phosphoramidate
  modified_base 15: mod_base = OTHER; note = 2-fluororibose uracil
  modified_base 16: mod_base = cm
  modified_base 16..17: mod_base = OTHER; note = S-phosphorothioate
  modified_base 17: mod_base = OTHER; note = 2-fluororibose cytosine
  modified_base 17..18: mod_base = OTHER; note = S-phosphorothioate
  modified_base 18: mod_base = OTHER; note = 2-fluororibose cytosine
  modified_base 18..19: mod_base = OTHER; note = S-phosphorothioate
  modified_base 19: mod_base = OTHER; note = 2-fluororibose uracil
  modified_base 19..20: mod_base = OTHER; note R-N-(1,3-dimethylimidazolidin-2-ylidene)phosphoramidate
  modified_base 20: mod_base = OTHER; note = 2-fluororibose uracil
  modified_base 20..21: mod_base = OTHER; note = S-phosphorothioate
  modified_base 21: mod_base = um
  modified_base 22: mod_base = OTHER; note = 2-fluororibose cytosine
  modified_base 22..23: mod_base = OTHER; note = S-phosphorothioate
  modified_base 23: mod_base = OTHER; note = 2-fluororibose uracil
  modified_base 23..24: mod_base = OTHER; note = S-phosphorothioate
  modified_base 24: mod_base = OTHER; note = arabinose cytosine
  modified_base 24..25: mod_base = OTHER; note = S-phosphorothioate
  modified_base 25: mod_base = OTHER; note = deoxyribose inosine
  modified_base 25..26: mod_base = OTHER; note S-N-(1,3-dimethylimidazolidin-2-ylidene)phosphoramidate
  modified_base 26: mod_base = um
  modified_base 27: mod_base = OTHER; note = 2-fluororibose cytosine
  modified_base 27..28: mod_base = OTHER; note = S-phosphorothioate
  modified_base 28: mod_base = gm
  modified_base 28..29: mod_base = OTHER; note = S-phosphorothioate
  modified_base 29: mod_base = OTHER; note = 2-O-methylribose adenine
  modified_base 29..30: mod_base = OTHER; note R-N-(1,3-dimethylimidazolidin-2-ylidene)phosphoramidate
  modified_base 30: mod_base = um
  source 1..30: mol_type = other RNA

SEQ ID NO: 728 - RNA, 30 nt, synthetic construct; identical to SEQ ID NO: 80
  misc_feature 1..30: note = Synthetic: WV-44480
  misc_feature 1..30: note = Synthetic: ADR-0104061
  modified_base 1: mod_base = cm
  modified_base 1..2: mod_base = OTHER; note R-N-(1,3-dimethylimidazolidin-2-ylidene)phosphoramidate
  modified_base 2: mod_base = cm
  modified_base 2..3: mod_base = OTHER; note = S-phosphorothioate
  modified_base 3: mod_base = cm
  modified_base 3..4: mod_base = OTHER; note = S-phosphorothioate
  modified_base 4: mod_base = OTHER; note = 2-fluororibose adenine
  modified_base 4..5: mod_base = OTHER; note = S-phosphorothioate
  modified_base 5: mod_base = OTHER; note = 2-fluororibose guanine
  modified_base 5..6: mod_base = OTHER; note = S-phosphorothioate
  modified_base 6: mod_base = OTHER; note = 2-fluororibose cytosine
  modified_base 7: mod_base = OTHER; note = 2-O-methylribose adenine
  modified_base 7..8: mod_base = OTHER; note = S-phosphorothioate
  modified_base 8: mod_base = OTHER; note = 2-fluororibose guanine
  modified_base 8..9: mod_base = OTHER; note = S-phosphorothioate
  modified_base 9: mod_base = OTHER; note = 2-fluororibose cytosine
  modified_base 10: mod_base = um
  modified_base 10..11: mod_base = OTHER; note = S-phosphorothioate
  modified_base 11: mod_base = OTHER; note = 2-fluororibose uracil
  modified_base 11..12: mod_base = OTHER; note R-N-(1,3-dimethylimidazolidin-2-ylidene)phosphoramidate
  modified_base 12: mod_base = cm
  modified_base 13: mod_base = OTHER; note = 2-fluororibose adenine
  modified_base 13..14: mod_base = OTHER; note = S-phosphorothioate
  modified_base 14: mod_base = OTHER; note = 2-fluororibose guanine
  modified_base 14..15: mod_base = OTHER; note R-N-(1,3-dimethylimidazolidin-2-ylidene)phosphoramidate
  modified_base 15: mod_base = OTHER; note = 2-fluororibose uracil
  modified_base 16: mod_base = cm
  modified_base 16..17: mod_base = OTHER; note = S-phosphorothioate
  modified_base 17: mod_base = OTHER; note = 2-fluororibose cytosine
  modified_base 17..18: mod_base = OTHER; note = S-phosphorothioate
  modified_base 18: mod_base = OTHER; note = 2-fluororibose cytosine
  modified_base 18..19: mod_base = OTHER; note = S-phosphorothioate
  modified_base 19: mod_base = OTHER; note = 2-fluororibose uracil
  modified_base 19..20: mod_base = OTHER; note R-N-(1,3-dimethylimidazolidin-2-ylidene)phosphoramidate
  modified_base 20: mod_base = OTHER; note = 2-fluororibose uracil
  modified_base 20..21: mod_base = OTHER; note = S-phosphorothioate
  modified_base 21: mod_base = um
  modified_base 22: mod_base = OTHER; note = 2-fluororibose cytosine
  modified_base 22..23: mod_base = OTHER; note = S-phosphorothioate
  modified_base 23: mod_base = OTHER; note = deoxyribose thymine
  modified_base 23..24: mod_base = OTHER; note = S-phosphorothioate
  modified_base 24: mod_base = OTHER; note = arabinose cytosine
  modified_base 24..25: mod_base = OTHER; note = S-phosphorothioate
  modified_base 25: mod_base = OTHER; note = deoxyribose inosine
  modified_base 25..26: mod_base = OTHER; note S-N-(1,3-dimethylimidazolidin-2-ylidene)phosphoramidate
  modified_base 26: mod_base = um
  modified_base 27: mod_base = OTHER; note = 2-fluororibose cytosine
  modified_base 27..28: mod_base = OTHER; note = S-phosphorothioate
  modified_base 28: mod_base = gm
  modified_base 28..29: mod_base = OTHER; note = S-phosphorothioate
  modified_base 29: mod_base = OTHER; note = 2-O-methylribose adenine
  modified_base 29..30: mod_base = OTHER; note R-N-(1,3-dimethylimidazolidin-2-ylidene)phosphoramidate
  modified_base 30: mod_base = um
  source 1..30: mol_type = other RNA

SEQ ID NO: 729 - RNA, 30 nt, synthetic construct; identical to SEQ ID NO: 273
  misc_feature 1..30: note = Synthetic: WV-44481
  misc_feature 1..30: note = Synthetic: ADR-0104239
  modified_base 1: mod_base = cm
  modified_base 1..2: mod_base = OTHER; note R-N-(1,3-dimethylimidazolidin-2-ylidene)phosphoramidate
  modified_base 2: mod_base = cm
  modified_base 2..3: mod_base = OTHER; note = S-phosphorothioate
  modified_base 3: mod_base = cm
  modified_base 3..4: mod_base = OTHER; note = S-phosphorothioate
  modified_base 4: mod_base = OTHER; note = 2-fluororibose adenine
  modified_base 4..5: mod_base = OTHER; note = S-phosphorothioate
  modified_base 5: mod_base = OTHER; note = 2-fluororibose guanine
  modified_base 5..6: mod_base = OTHER; note = S-phosphorothioate
  modified_base 6: mod_base = cm
  modified_base 7: mod_base = OTHER; note = 2-O-methylribose adenine
  modified_base 7..8: mod_base = OTHER; note = S-phosphorothioate
  modified_base 8: mod_base = OTHER; note = 2-fluororibose guanine
  modified_base 8..9: mod_base = OTHER; note = S-phosphorothioate
  modified_base 9: mod_base = OTHER; note = 2-fluororibose cytosine
  modified_base 10: mod_base = um
  modified_base 10..11: mod_base = OTHER; note = S-phosphorothioate
  modified_base 11: mod_base = OTHER; note = 2-fluororibose uracil
  modified_base 11..12: mod_base = OTHER; note R-N-(1,3-dimethylimidazolidin-2-ylidene)phosphoramidate
  modified_base 12: mod_base = cm
  modified_base 13: mod_base = OTHER; note = 2-fluororibose adenine
  modified_base 13..14: mod_base = OTHER; note = S-phosphorothioate
  modified_base 14: mod_base = OTHER; note = 2-fluororibose guanine
  modified_base 14..15: mod_base = OTHER; note R-N-(1,3-dimethylimidazolidin-2-ylidene)phosphoramidate
  modified_base 15: mod_base = OTHER; note = 2-fluororibose uracil
  modified_base 16: mod_base = cm
  modified_base 16..17: mod_base = OTHER; note = S-phosphorothioate
  modified_base 17: mod_base = OTHER; note = 2-fluororibose cytosine
  modified_base 17..18: mod_base = OTHER; note = S-phosphorothioate
  modified_base 18: mod_base = OTHER; note = 2-fluororibose cytosine
  modified_base 18..19: mod_base = OTHER; note = S-phosphorothioate
  modified_base 19: mod_base = OTHER; note = 2-fluororibose uracil
  modified_base 19..20: mod_base = OTHER; note R-N-(1,3-dimethylimidazolidin-2-ylidene)phosphoramidate
  modified_base 20: mod_base = OTHER; note = 2-fluororibose uracil
  modified_base 20..21: mod_base = OTHER; note = S-phosphorothioate
  modified_base 21: mod_base = um
  modified_base 22: mod_base = OTHER; note = 2-fluororibose cytosine
  modified_base 22..23: mod_base = OTHER; note = S-phosphorothioate
  modified_base 23: mod_base = OTHER; note = deoxyribose thymine
  modified_base 23..24: mod_base = OTHER; note = S-phosphorothioate
  modified_base 24: mod_base = OTHER; note = deoxyribose uracil (position 3 connectivity)
  modified_base 24..25: mod_base = OTHER; note = S-phosphorothioate
  modified_base 25: mod_base = OTHER; note = deoxyribose inosine
  modified_base 25..26: mod_base = OTHER; note S-N-(1,3-dimethylimidazolidin-2-ylidene)phosphoramidate
  modified_base 26: mod_base = um
  modified_base 27: mod_base = OTHER; note = 2-fluororibose cytosine
  modified_base 27..28: mod_base = OTHER; note = S-phosphorothioate
  modified_base 28: mod_base = gm
  modified_base 28..29: mod_base = OTHER; note = S-phosphorothioate
  modified_base 29: mod_base = OTHER; note = 2-O-methylribose adenine
  modified_base 29..30: mod_base = OTHER; note R-N-(1,3-dimethylimidazolidin-2-ylidene)phosphoramidate
  modified_base 30: mod_base = um
  source 1..30: mol_type = other RNA

SEQ ID NO: 730 - RNA, 30 nt, synthetic construct; identical to SEQ ID NO: 273
  misc_feature 1..30: note = Synthetic: WV-44483
  misc_feature 1..30: note = Synthetic: ADR-0104242
  modified_base 1: mod_base = cm
  modified_base 1..2: mod_base = OTHER; note R-N-(1,3-dimethylimidazolidin-2-ylidene)phosphoramidate
  modified_base 2: mod_base = cm
  modified_base 2..3: mod_base = OTHER; note = S-phosphorothioate
  modified_base 3: mod_base = cm
  modified_base 3..4: mod_base = OTHER; note = S-phosphorothioate
  modified_base 4: mod_base = OTHER; note = 2-fluororibose adenine
  modified_base 4..5: mod_base = OTHER; note = S-phosphorothioate
  modified_base 5: mod_base = OTHER; note = 2-fluororibose guanine
  modified_base 5..6: mod_base = OTHER; note = S-phosphorothioate
  modified_base 6: mod_base = cm
  modified_base 7: mod_base = OTHER; note = 2-O-methylribose adenine
  modified_base 7..8: mod_base = OTHER; note = S-phosphorothioate
  modified_base 8: mod_base = OTHER; note = 2-fluororibose guanine
  modified_base 8..9: mod_base = OTHER; note = S-phosphorothioate
  modified_base 9: mod_base = OTHER; note = 2-fluororibose cytosine
  modified_base 10: mod_base = um
  modified_base 10..11: mod_base = OTHER; note = S-phosphorothioate
  modified_base 11: mod_base = OTHER; note = 2-fluororibose uracil
  modified_base 11..12: mod_base = OTHER; note R-N-(1,3-dimethylimidazolidin-2-ylidene)phosphoramidate
  modified_base 12: mod_base = cm
  modified_base 13: mod_base = OTHER; note = 2-fluororibose adenine
  modified_base 13..14: mod_base = OTHER; note = S-phosphorothioate
  modified_base 14: mod_base = OTHER; note = 2-fluororibose guanine
  modified_base 14..15: mod_base = OTHER; note R-N-(1,3-dimethylimidazolidin-2-ylidene)phosphoramidate
  modified_base 15: mod_base = OTHER; note = 2-fluororibose uracil
  modified_base 16: mod_base = cm
  modified_base 16..17: mod_base = OTHER; note = S-phosphorothioate
  modified_base 17: mod_base = OTHER; note = 2-fluororibose cytosine
  modified_base 17..18: mod_base = OTHER; note = S-phosphorothioate
  modified_base 18: mod_base = OTHER; note = 2-fluororibose cytosine
  modified_base 18..19: mod_base = OTHER; note = S-phosphorothioate
  modified_base 19: mod_base = OTHER; note = 2-fluororibose uracil
  modified_base 19..20: mod_base = OTHER; note R-N-(1,3-dimethylimidazolidin-2-ylidene)phosphoramidate
  modified_base 20: mod_base = um
  modified_base 21: mod_base = um
  modified_base 22: mod_base = OTHER; note = 2-fluororibose cytosine
  modified_base 22..23: mod_base = OTHER; note = S-phosphorothioate
  modified_base 23: mod_base = OTHER; note = deoxyribose thymine
  modified_base 23..24: mod_base = OTHER; note = S-phosphorothioate
  modified_base 24: mod_base = OTHER; note = deoxyribose uracil (position 3 connectivity)
  modified_base 24..25: mod_base = OTHER; note = S-phosphorothioate
  modified_base 25: mod_base = OTHER; note = deoxyribose inosine
  modified_base 25..26: mod_base = OTHER; note S-N-(1,3-dimethylimidazolidin-2-ylidene)phosphoramidate
  modified_base 26: mod_base = um
  modified_base 27: mod_base = OTHER; note = 2-fluororibose cytosine
  modified_base 27..28: mod_base = OTHER; note = S-phosphorothioate
  modified_base 28: mod_base = gm
  modified_base 28..29: mod_base = OTHER; note = S-phosphorothioate
  modified_base 29: mod_base = OTHER; note = 2-O-methylribose adenine
  modified_base 29..30: mod_base = OTHER; note R-N-(1,3-dimethylimidazolidin-2-ylidene)phosphoramidate
  modified_base 30: mod_base = um
  source 1..30: mol_type = other RNA

SEQ ID NO: 731 - RNA, 30 nt, synthetic construct; identical to SEQ ID NO: 273
  misc_feature 1..30: note = Synthetic: WV-44486
  misc_feature 1..30: note = Synthetic: ADR-0104260
  modified_base 1: mod_base = cm
  modified_base 1..2: mod_base = OTHER; note R-N-(1,3-dimethylimidazolidin-2-ylidene)phosphoramidate
  modified_base 2: mod_base = cm
  modified_base 2..3: mod_base = OTHER; note = S-phosphorothioate
  modified_base 3: mod_base = cm
  modified_base 3..4: mod_base = OTHER; note = S-phosphorothioate
  modified_base 4: mod_base = OTHER; note = 2-fluororibose adenine
  modified_base 4..5: mod_base = OTHER; note = S-phosphorothioate
  modified_base 5: mod_base = OTHER; note = 2-fluororibose guanine
  modified_base 5..6: mod_base = OTHER; note = S-phosphorothioate
  modified_base 6: mod_base = cm
  modified_base 7: mod_base = OTHER; note = 2-O-methylribose adenine
  modified_base 8: mod_base = OTHER; note = 2-fluororibose guanine
  modified_base 8..9: mod_base = OTHER; note = S-phosphorothioate
  modified_base 9: mod_base = OTHER; note = 2-fluororibose cytosine
  modified_base 9..10: mod_base = OTHER; note = S-phosphorothioate
  modified_base 10: mod_base = um
  modified_base 10..11: mod_base = OTHER; note = S-phosphorothioate
  modified_base 11: mod_base = OTHER; note = 2-fluororibose uracil
  modified_base 11..12: mod_base = OTHER; note R-N-(1,3-dimethylimidazolidin-2-ylidene)phosphoramidate
  modified_base 12: mod_base = cm
  modified_base 13: mod_base = OTHER; note = 2-fluororibose adenine
  modified_base 13..14: mod_base = OTHER; note = S-phosphorothioate
  modified_base 14: mod_base = OTHER; note = 2-fluororibose guanine
  modified_base 14..15: mod_base = OTHER; note R-N-(1,3-dimethylimidazolidin-2-ylidene)phosphoramidate
  modified_base 15: mod_base = OTHER; note = 2-fluororibose uracil
  modified_base 16: mod_base = cm
  modified_base 16..17: mod_base = OTHER; note = S-phosphorothioate
  modified_base 17: mod_base = OTHER; note = 2-fluororibose cytosine
  modified_base 17..18: mod_base = OTHER; note = S-phosphorothioate
  modified_base 18: mod_base = OTHER; note = 2-fluororibose cytosine
  modified_base 18..19: mod_base = OTHER; note = S-phosphorothioate
  modified_base 19: mod_base = OTHER; note = 2-fluororibose uracil
  modified_base 19..20: mod_base = OTHER; note R-N-(1,3-dimethylimidazolidin-2-ylidene)phosphoramidate
  modified_base 20: mod_base = um
  modified_base 21: mod_base = um
  modified_base 22: mod_base = OTHER; note = 2-fluororibose cytosine
  modified_base 22..23: mod_base = OTHER; note = S-phosphorothioate
  modified_base 23: mod_base = OTHER; note = deoxyribose thymine
  modified_base 23..24: mod_base = OTHER; note = S-phosphorothioate
  modified_base 24: mod_base = OTHER; note = deoxyribose uracil (position 3 connectivity)
  modified_base 24..25: mod_base = OTHER; note = S-phosphorothioate
  modified_base 25: mod_base = OTHER; note = deoxyribose inosine
  modified_base 25..26: mod_base = OTHER; note S-N-(1,3-dimethylimidazolidin-2-ylidene)phosphoramidate
  modified_base 26: mod_base = um
  modified_base 27: mod_base = OTHER; note = 2-fluororibose cytosine
  modified_base 27..28: mod_base = OTHER; note = S-phosphorothioate
  modified_base 28: mod_base = gm
  modified_base 28..29: mod_base = OTHER; note = S-phosphorothioate
  modified_base 29: mod_base = OTHER; note = 2-O-methylribose adenine
  modified_base 29..30: mod_base = OTHER; note R-N-(1,3-dimethylimidazolidin-2-ylidene)phosphoramidate
  modified_base 30: mod_base = um
  source 1..30: mol_type = other RNA

SEQ ID NO: 732 - RNA, 30 nt, synthetic construct; identical to SEQ ID NO: 273
  misc_feature 1..30: note = Synthetic: WV-44488
  misc_feature 1..30: note = Synthetic: ADR-0104290
  modified_base 1: mod_base = cm
  modified_base 1..2: mod_base = OTHER; note R-N-(1,3-dimethylimidazolidin-2-ylidene)phosphoramidate
  modified_base 2: mod_base = cm
  modified_base 2..3: mod_base = OTHER; note = S-phosphorothioate
  modified_base 3: mod_base = cm
  modified_base 3..4: mod_base = OTHER; note = S-phosphorothioate
  modified_base 4: mod_base = OTHER; note = 2-fluororibose adenine
  modified_base 4..5: mod_base = OTHER; note = S-phosphorothioate
  modified_base 5: mod_base = OTHER; note = 2-fluororibose guanine
  modified_base 5..6: mod_base = OTHER; note = S-phosphorothioate
  modified_base 6: mod_base = cm
  modified_base 7: mod_base = OTHER; note = 2-O-methylribose adenine
  modified_base 8: mod_base = OTHER; note = 2-fluororibose guanine
  modified_base 8..9: mod_base = OTHER; note = S-phosphorothioate
  modified_base 9: mod_base = OTHER; note = 2-fluororibose cytosine
  modified_base 10: mod_base = um
  modified_base 11: mod_base = OTHER; note = 2-fluororibose uracil
  modified_base 11..12: mod_base = OTHER; note R-N-(1,3-dimethylimidazolidin-2-ylidene)phosphoramidate
  modified_base 12: mod_base = cm
  modified_base 13: mod_base = OTHER; note = 2-fluororibose adenine
  modified_base 13..14: mod_base = OTHER; note = S-phosphorothioate
  modified_base 14: mod_base = OTHER; note = 2-fluororibose guanine
  modified_base 14..15: mod_base = OTHER; note R-N-(1,3-dimethylimidazolidin-2-ylidene)phosphoramidate
  modified_base 15: mod_base = OTHER; note = 2-fluororibose uracil
  modified_base 16: mod_base = cm
  modified_base 16..17: mod_base = OTHER; note = S-phosphorothioate
  modified_base 17: mod_base = OTHER; note = 2-fluororibose cytosine
  modified_base 17..18: mod_base = OTHER; note = S-phosphorothioate
  modified_base 18: mod_base = OTHER; note = 2-fluororibose cytosine
  modified_base 18..19: mod_base = OTHER; note = S-phosphorothioate
  modified_base 19: mod_base = OTHER; note = 2-fluororibose uracil
  modified_base 19..20: mod_base = OTHER; note R-N-(1,3-dimethylimidazolidin-2-ylidene)phosphoramidate
  modified_base 20: mod_base = um
  modified_base 21: mod_base = um
  modified_base 22: mod_base = OTHER; note = 2-fluororibose cytosine
  modified_base 22..23: mod_base = OTHER; note = S-phosphorothioate
  modified_base 23: mod_base = OTHER; note = deoxyribose thymine
  modified_base 23..24: mod_base = OTHER; note = S-phosphorothioate
  modified_base 24: mod_base = OTHER; note = deoxyribose uracil (position 3 connectivity)
  modified_base 24..25: mod_base = OTHER; note = S-phosphorothioate
  modified_base 25: mod_base = OTHER; note = deoxyribose inosine
  modified_base 25..26: mod_base = OTHER; note S-N-(1,3-dimethylimidazolidin-2-ylidene)phosphoramidate
  modified_base 26: mod_base = um
  modified_base 27: mod_base = OTHER; note = 2-fluororibose cytosine
  modified_base 27..28: mod_base = OTHER; note = S-phosphorothioate
  modified_base 28: mod_base = gm
  modified_base 28..29: mod_base = OTHER; note = S-phosphorothioate
  modified_base 29: mod_base = OTHER; note = 2-O-methylribose adenine
  modified_base 29..30: mod_base = OTHER; note R-N-(1,3-dimethylimidazolidin-2-ylidene)phosphoramidate
  modified_base 30: mod_base = um
  source 1..30: mol_type = other RNA

SEQ ID NO: 733 - RNA, 30 nt, synthetic construct; identical to SEQ ID NO: 273
  misc_feature 1..30: note = Synthetic: WV-44489
  misc_feature 1..30: note = Synthetic: ADR-0104283
  modified_base 1: mod_base = cm
  modified_base 1..2: mod_base = OTHER; note R-N-(1,3-dimethylimidazolidin-2-ylidene)phosphoramidate
  modified_base 2: mod_base = cm
  modified_base 2..3: mod_base = OTHER; note = S-phosphorothioate
  modified_base 3: mod_base = cm
  modified_base 3..4: mod_base = OTHER; note = S-phosphorothioate
  modified_base 4: mod_base = OTHER; note = 2-fluororibose adenine
  modified_base 4..5: mod_base = OTHER; note = S-phosphorothioate
  modified_base 5: mod_base = OTHER; note = 2-fluororibose guanine
  modified_base 5..6: mod_base = OTHER; note = S-phosphorothioate
  modified_base 6: mod_base = cm
  modified_base 7: mod_base = OTHER; note = 2-O-methylribose adenine
  modified_base 8: mod_base = OTHER; note = 2-fluororibose guanine
  modified_base 8..9: mod_base = OTHER; note = S-phosphorothioate
  modified_base 9: mod_base = OTHER; note = 2-fluororibose cytosine
  modified_base 10: mod_base = um
  modified_base 10..11: mod_base = OTHER; note = S-phosphorothioate
  modified_base 11: mod_base = OTHER; note = 2-fluororibose uracil
  modified_base 11..12: mod_base = OTHER; note R-N-(1,3-dimethylimidazolidin-2-ylidene)phosphoramidate
  modified_base 12: mod_base = cm
  modified_base 13: mod_base = OTHER; note = 2-fluororibose adenine
  modified_base 13..14: mod_base = OTHER; note = S-phosphorothioate
  modified_base 14: mod_base = OTHER; note = 2-fluororibose guanine
  modified_base 14..15: mod_base = OTHER; note R-N-(1,3-dimethylimidazolidin-2-ylidene)phosphoramidate
  modified_base 15: mod_base = OTHER; note = 2-fluororibose uracil
  modified_base 16: mod_base = cm
  modified_base 16..17: mod_base = OTHER; note = S-phosphorothioate
  modified_base 17: mod_base = OTHER; note = 2-fluororibose cytosine
  modified_base 17..18: mod_base = OTHER; note = S-phosphorothioate
  modified_base 18: mod_base = cm
  modified_base 18..19: mod_base = OTHER; note = S-phosphorothioate
  modified_base 19: mod_base = OTHER; note = 2-fluororibose uracil
  modified_base 19..20: mod_base = OTHER; note R-N-(1,3-dimethylimidazolidin-2-ylidene)phosphoramidate
  modified_base 20: mod_base = um
  modified_base 21: mod_base = um
  modified_base 22: mod_base = OTHER; note = 2-fluororibose cytosine
  modified_base 22..23: mod_base = OTHER; note = S-phosphorothioate
  modified_base 23: mod_base = OTHER; note = deoxyribose thymine
  modified_base 23..24: mod_base = OTHER; note = S-phosphorothioate
  modified_base 24: mod_base = OTHER; note = deoxyribose uracil (position 3 connectivity)
  modified_base 24..25: mod_base = OTHER; note = S-phosphorothioate
  modified_base 25: mod_base = OTHER; note = deoxyribose inosine
  modified_base 25..26: mod_base = OTHER; note S-N-(1,3-dimethylimidazolidin-2-ylidene)phosphoramidate
  modified_base 26: mod_base = um
  modified_base 27: mod_base = OTHER; note = 2-fluororibose cytosine
  modified_base 27..28: mod_base = OTHER; note = S-phosphorothioate
  modified_base 28: mod_base = gm
  modified_base 28..29: mod_base = OTHER; note = S-phosphorothioate
  modified_base 29: mod_base = OTHER; note = 2-O-methylribose adenine
  modified_base 29..30: mod_base = OTHER; note R-N-(1,3-dimethylimidazolidin-2-ylidene)phosphoramidate
  modified_base 30: mod_base = um
  source 1..30: mol_type = other RNA

SEQ ID NO: 734 - RNA, 30 nt, synthetic construct; identical to SEQ ID NO: 273
  misc_feature 1..30: note = Synthetic: WV-44490
  misc_feature 1..30: note = Synthetic: ADR-0104284
  modified_base 1: mod_base = cm
  modified_base 1..2: mod_base = OTHER; note R-N-(1,3-dimethylimidazolidin-2-ylidene)phosphoramidate
  modified_base 2: mod_base = cm
  modified_base 2..3: mod_base = OTHER; note = S-phosphorothioate
  modified_base 3: mod_base = cm
  modified_base 3..4: mod_base = OTHER; note = S-phosphorothioate
  modified_base 4: mod_base = OTHER; note = 2-fluororibose adenine
  modified_base 4..5: mod_base = OTHER; note = S-phosphorothioate
  modified_base 5: mod_base = OTHER; note = 2-fluororibose guanine
  modified_base 5..6: mod_base = OTHER; note = S-phosphorothioate
  modified_base 6: mod_base = cm
  modified_base 7: mod_base = OTHER; note = 2-O-methylribose adenine
  modified_base 8: mod_base = OTHER; note = 2-fluororibose guanine
  modified_base 8..9: mod_base = OTHER; note = S-phosphorothioate
  modified_base 9: mod_base = OTHER; note = 2-fluororibose cytosine
  modified_base 10: mod_base = um
  modified_base 10..11: mod_base = OTHER; note = S-phosphorothioate
  modified_base 11: mod_base = OTHER; note = 2-fluororibose uracil
  modified_base 11..12: mod_base = OTHER; note R-N-(1,3-dimethylimidazolidin-2-ylidene)phosphoramidate
  modified_base 12: mod_base = cm
  modified_base 13: mod_base = OTHER; note = 2-fluororibose adenine
  modified_base 13..14: mod_base = OTHER; note = S-phosphorothioate
  modified_base 14: mod_base = OTHER; note = 2-fluororibose guanine
  modified_base 14..15: mod_base = OTHER; note R-N-(1,3-dimethylimidazolidin-2-ylidene)phosphoramidate
  modified_base 15: mod_base = OTHER; note = 2-fluororibose uracil
  modified_base 16: mod_base = cm
  modified_base 16..17: mod_base = OTHER; note = S-phosphorothioate
  modified_base 17: mod_base = OTHER; note = 2-fluororibose cytosine
  modified_base 17..18: mod_base = OTHER; note = S-phosphorothioate
  modified_base 18: mod_base = cm
  modified_base 19: mod_base = OTHER; note = 2-fluororibose uracil
  modified_base 19..20: mod_base = OTHER; note R-N-(1,3-dimethylimidazolidin-2-ylidene)phosphoramidate
  modified_base 20: mod_base = um
  modified_base 21: mod_base = um
  modified_base 22: mod_base = OTHER; note = 2-fluororibose cytosine
  modified_base 22..23: mod_base = OTHER; note = S-phosphorothioate
  modified_base 23: mod_base = OTHER; note = deoxyribose thymine
  modified_base 23..24: mod_base = OTHER; note = S-phosphorothioate
  modified_base 24: mod_base = OTHER; note = deoxyribose uracil (position 3 connectivity)
  modified_base 24..25: mod_base = OTHER; note = S-phosphorothioate
  modified_base 25: mod_base = OTHER; note = deoxyribose inosine
  modified_base 25..26: mod_base = OTHER; note S-N-(1,3-dimethylimidazolidin-2-ylidene)phosphoramidate
  modified_base 26: mod_base = um
  modified_base 27: mod_base = OTHER; note = 2-fluororibose cytosine
  modified_base 27..28: mod_base = OTHER; note = S-phosphorothioate
  modified_base 28: mod_base = gm
  modified_base 28..29: mod_base = OTHER; note = S-phosphorothioate
  modified_base 29: mod_base = OTHER; note = 2-O-methylribose adenine
  modified_base 29..30: mod_base = OTHER; note R-N-(1,3-dimethylimidazolidin-2-ylidene)phosphoramidate
  modified_base 30: mod_base = um
  source 1..30: mol_type = other RNA

SEQ ID NO: 735 - RNA, 30 nt, synthetic construct; identical to SEQ ID NO: 273
  misc_feature 1..30: note = Synthetic: WV-44491
  misc_feature 1..30: note = Synthetic: ADR-0104285
  modified_base 1: mod_base = cm
  modified_base 1..2: mod_base = OTHER; note R-N-(1,3-dimethylimidazolidin-2-ylidene)phosphoramidate
  modified_base 2: mod_base = cm
  modified_base 2..3: mod_base = OTHER; note = S-phosphorothioate
  modified_base 3: mod_base = cm
  modified_base 3..4: mod_base = OTHER; note = S-phosphorothioate
  modified_base 4: mod_base = OTHER; note = 2-fluororibose adenine
  modified_base 4..5: mod_base = OTHER; note = S-phosphorothioate
  modified_base 5: mod_base = OTHER; note = 2-fluororibose guanine
  modified_base 5..6: mod_base = OTHER; note = S-phosphorothioate
  modified_base 6: mod_base = cm
  modified_base 7: mod_base = OTHER; note = 2-O-methylribose adenine
  modified_base 8: mod_base = OTHER; note = 2-fluororibose guanine
  modified_base 8..9: mod_base = OTHER; note = S-phosphorothioate
  modified_base 9: mod_base = OTHER; note = 2-fluororibose cytosine
  modified_base 10: mod_base = um
  modified_base 10..11: mod_base = OTHER; note = S-phosphorothioate
  modified_base 11: mod_base = OTHER; note = 2-fluororibose uracil
  modified_base 11..12: mod_base = OTHER; note R-N-(1,3-dimethylimidazolidin-2-ylidene)phosphoramidate
  modified_base 12: mod_base = cm
  modified_base 13: mod_base = OTHER; note = 2-fluororibose adenine
  modified_base 13..14: mod_base = OTHER; note = S-phosphorothioate
  modified_base 14: mod_base = OTHER; note = 2-fluororibose guanine
  modified_base 14..15: mod_base = OTHER; note R-N-(1,3-dimethylimidazolidin-2-ylidene)phosphoramidate
  modified_base 15: mod_base = OTHER; note = 2-fluororibose uracil
  modified_base 16: mod_base = cm
  modified_base 17: mod_base = OTHER; note = 2-fluororibose cytosine
  modified_base 17..18: mod_base = OTHER; note = S-phosphorothioate
  modified_base 18: mod_base = cm
  modified_base 19: mod_base = OTHER; note = 2-fluororibose uracil
  modified_base 19..20: mod_base = OTHER; note R-N-(1,3-dimethylimidazolidin-2-ylidene)phosphoramidate
  modified_base 20: mod_base = um
  modified_base 21: mod_base = um
  modified_base 22: mod_base = OTHER; note = 2-fluororibose cytosine
  modified_base 22..23: mod_base = OTHER; note = S-phosphorothioate
  modified_base 23: mod_base = OTHER; note = deoxyribose thymine
  modified_base 23..24: mod_base = OTHER; note = S-phosphorothioate
  modified_base 24: mod_base = OTHER; note = deoxyribose uracil (position 3 connectivity)
  modified_base 24..25: mod_base = OTHER; note = S-phosphorothioate
  modified_base 25: mod_base = OTHER; note = deoxyribose inosine
  modified_base 25..26: mod_base = OTHER; note S-N-(1,3-dimethylimidazolidin-2-ylidene)phosphoramidate
  modified_base 26: mod_base = um
  modified_base 27: mod_base = OTHER; note = 2-fluororibose cytosine
  modified_base 27..28: mod_base = OTHER; note = S-phosphorothioate
  modified_base 28: mod_base = gm
  modified_base 28..29: mod_base = OTHER; note = S-phosphorothioate
  modified_base 29: mod_base = OTHER; note = 2-O-methylribose adenine
  modified_base 29..30: mod_base = OTHER; note R-N-(1,3-dimethylimidazolidin-2-ylidene)phosphoramidate
  modified_base 30: mod_base = um
  source 1..30: mol_type = other RNA

SEQ ID NO: 736 - RNA, 30 nt, synthetic construct; identical to SEQ ID NO: 273
  misc_feature 1..30: note = Synthetic: WV-44492
  misc_feature 1..30: note = Synthetic: ADR-0104291
  modified_base 1: mod_base = cm
  modified_base 1..2: mod_base = OTHER; note R-N-(1,3-dimethylimidazolidin-2-ylidene)phosphoramidate
  modified_base 2: mod_base = cm
  modified_base 2..3: mod_base = OTHER; note = S-phosphorothioate
  modified_base 3: mod_base = cm
  modified_base 3..4: mod_base = OTHER; note = S-phosphorothioate
  modified_base 4: mod_base = OTHER; note = 2-fluororibose adenine
  modified_base 4..5: mod_base = OTHER; note = S-phosphorothioate
  modified_base 5: mod_base = OTHER; note = 2-fluororibose guanine
  modified_base 5..6: mod_base = OTHER; note = S-phosphorothioate
  modified_base 6: mod_base = cm
  modified_base 7: mod_base = OTHER; note = 2-O-methylribose adenine
  modified_base 8: mod_base = OTHER; note = 2-fluororibose guanine
  modified_base 8..9: mod_base = OTHER; note = S-phosphorothioate
  modified_base 9: mod_base = OTHER; note = 2-fluororibose cytosine
  modified_base 10: mod_base = um
  modified_base 11: mod_base = OTHER; note = 2-fluororibose uracil
  modified_base 11..12: mod_base = OTHER; note R-N-(1,3-dimethylimidazolidin-2-ylidene)phosphoramidate
  modified_base 12: mod_base = cm
  modified_base 13: mod_base = OTHER; note = 2-fluororibose adenine
  modified_base 13..14: mod_base = OTHER; note = S-phosphorothioate
  modified_base 14: mod_base = OTHER; note = 2-fluororibose guanine
  modified_base 14..15: mod_base = OTHER; note R-N-(1,3-dimethylimidazolidin-2-ylidene)phosphoramidate
  modified_base 15: mod_base = OTHER; note = 2-fluororibose uracil
  modified_base 16: mod_base = cm
  modified_base 17: mod_base = OTHER; note = 2-fluororibose cytosine
  modified_base 17..18: mod_base = OTHER; note = S-phosphorothioate
  modified_base 18: mod_base = cm
  modified_base 19: mod_base = OTHER; note = 2-fluororibose uracil
  modified_base 19..20: mod_base = OTHER; note R-N-(1,3-dimethylimidazolidin-2-ylidene)phosphoramidate
  modified_base 20: mod_base = um
  modified_base 21: mod_base = um
  modified_base 22: mod_base = OTHER; note = 2-fluororibose cytosine
  modified_base 22..23: mod_base = OTHER; note = S-phosphorothioate
  modified_base 23: mod_base = OTHER; note = deoxyribose thymine
  modified_base 23..24: mod_base = OTHER; note = S-phosphorothioate
  modified_base 24: mod_base = OTHER; note = deoxyribose uracil (position 3 connectivity)
  modified_base 24..25: mod_base = OTHER; note = S-phosphorothioate
  modified_base 25: mod_base = OTHER; note = deoxyribose inosine
  modified_base 25..26: mod_base = OTHER; note S-N-(1,3-dimethylimidazolidin-2-ylidene)phosphoramidate
  modified_base 26: mod_base = um
  modified_base 27: mod_base = OTHER; note = 2-fluororibose cytosine
  modified_base 27..28: mod_base = OTHER; note = S-phosphorothioate
  modified_base 28: mod_base = gm
  modified_base 28..29: mod_base = OTHER; note = S-phosphorothioate
  modified_base 29: mod_base = OTHER; note = 2-O-methylribose adenine
  modified_base 29..30: mod_base = OTHER; note R-N-(1,3-dimethylimidazolidin-2-ylidene)phosphoramidate
  modified_base 30: mod_base = um
  source 1..30: mol_type = other RNA

SEQ ID NO: 737 - RNA, 30 nt, synthetic construct; identical to SEQ ID NO: 273
  misc_feature 1..30: note = Synthetic: WV-44493
  misc_feature 1..30: note = Synthetic: ADR-0104292
  modified_base 1: mod_base = cm
  modified_base 1..2: mod_base = OTHER; note R-N-(1,3-dimethylimidazolidin-2-ylidene)phosphoramidate
  modified_base 2: mod_base = cm
  modified_base 2..3: mod_base = OTHER; note = S-phosphorothioate
  modified_base 3: mod_base = cm
  modified_base 3..4: mod_base = OTHER; note = S-phosphorothioate
  modified_base 4: mod_base = OTHER; note = 2-fluororibose adenine
  modified_base 4..5: mod_base = OTHER; note = S-phosphorothioate
  modified_base 5: mod_base = OTHER; note = 2-fluororibose guanine
  modified_base 5..6: mod_base = OTHER; note = S-phosphorothioate
  modified_base 6: mod_base = cm
  modified_base 7: mod_base = OTHER; note = 2-O-methylribose adenine
  modified_base 8: mod_base = OTHER; note = 2-fluororibose guanine
  modified_base 8..9: mod_base = OTHER; note = S-phosphorothioate
  modified_base 9: mod_base = OTHER; note = 2-fluororibose cytosine
  modified_base 10: mod_base = um
  modified_base 11: mod_base = OTHER; note = 2-fluororibose uracil
  modified_base 11..12: mod_base = OTHER; note R-N-(1,3-dimethylimidazolidin-2-ylidene)phosphoramidate
  modified_base 12: mod_base = cm
  modified_base 13: mod_base = OTHER; note = 2-fluororibose adenine
  modified_base 14: mod_base = OTHER; note = 2-fluororibose guanine
  modified_base 14..15: mod_base = OTHER; note R-N-(1,3-dimethylimidazolidin-2-ylidene)phosphoramidate
  modified_base 15: mod_base = OTHER; note = 2-fluororibose uracil
  modified_base 16: mod_base = cm
  modified_base 17: mod_base = OTHER; note = 2-fluororibose cytosine
  modified_base 17..18: mod_base = OTHER; note = S-phosphorothioate
  modified_base 18: mod_base = cm
  modified_base 19: mod_base = OTHER; note = 2-fluororibose uracil
  modified_base 19..20: mod_base = OTHER; note R-N-(1,3-dimethylimidazolidin-2-ylidene)phosphoramidate
  modified_base 20: mod_base = um
  modified_base 21: mod_base = um
  modified_base 22: mod_base = OTHER; note = 2-fluororibose cytosine
  modified_base 22..23: mod_base = OTHER; note = S-phosphorothioate
  modified_base 23: mod_base = OTHER; note = deoxyribose thymine
  modified_base 23..24: mod_base = OTHER; note = S-phosphorothioate
  modified_base 24: mod_base = OTHER; note = deoxyribose uracil (position 3 connectivity)
  modified_base 24..25: mod_base = OTHER; note = S-phosphorothioate
  modified_base 25: mod_base = OTHER; note = deoxyribose inosine
  modified_base 25..26: mod_base = OTHER; note S-N-(1,3-dimethylimidazolidin-2-ylidene)phosphoramidate
  modified_base 26: mod_base = um
  modified_base 27: mod_base = OTHER; note = 2-fluororibose cytosine
  modified_base 27..28: mod_base = OTHER; note = S-phosphorothioate
  modified_base 28: mod_base = gm
  modified_base 28..29: mod_base = OTHER; note = S-phosphorothioate
  modified_base 29: mod_base = OTHER; note = 2-O-methylribose adenine
  modified_base 29..30: mod_base = OTHER; note R-N-(1,3-dimethylimidazolidin-2-ylidene)phosphoramidate
  modified_base 30: mod_base = um
  source 1..30: mol_type = other RNA

SEQ ID NO: 738 - RNA, 30 nt, synthetic construct; identical to SEQ ID NO: 273
  misc_feature 1..30: note = Synthetic: WV-44494
  misc_feature 1..30: note = Synthetic: ADR-0104303
  modified_base 1: mod_base = cm
  modified_base 1..2: mod_base = OTHER; note R-N-(1,3-dimethylimidazolidin-2-ylidene)phosphoramidate
  modified_base 2: mod_base = cm
  modified_base 2..3: mod_base = OTHER; note = S-phosphorothioate
  modified_base 3: mod_base = cm
  modified_base 3..4: mod_base = OTHER; note = S-phosphorothioate
  modified_base 4: mod_base = OTHER; note = 2-fluororibose adenine
  modified_base 4..5: mod_base = OTHER; note = S-phosphorothioate
  modified_base 5: mod_base = OTHER; note = 2-fluororibose guanine
  modified_base 5..6: mod_base = OTHER; note = S-phosphorothioate
  modified_base 6: mod_base = cm
  modified_base 7: mod_base = OTHER; note = 2-O-methylribose adenine
  modified_base 8: mod_base = gm
  modified_base 9: mod_base = OTHER; note = 2-fluororibose cytosine
  modified_base 10: mod_base = um
  modified_base 11: mod_base = OTHER; note = 2-fluororibose uracil
  modified_base 11..12: mod_base = OTHER; note R-N-(1,3-dimethylimidazolidin-2-ylidene)phosphoramidate
  modified_base 12: mod_base = cm
  modified_base 13: mod_base = OTHER; note = 2-fluororibose adenine
  modified_base 14: mod_base = gm
  modified_base 14..15: mod_base = OTHER; note R-N-(1,3-dimethylimidazolidin-2-ylidene)phosphoramidate
  modified_base 15: mod_base = OTHER; note = 2-fluororibose uracil
  modified_base 16: mod_base = cm
  modified_base 17: mod_base = OTHER; note = 2-fluororibose cytosine
  modified_base 17..18: mod_base = OTHER; note = S-phosphorothioate
  modified_base 18: mod_base = cm
  modified_base 19: mod_base = OTHER; note = 2-fluororibose uracil
  modified_base 19..20: mod_base = OTHER; note R-N-(1,3-dimethylimidazolidin-2-ylidene)phosphoramidate
  modified_base 20: mod_base = um
  modified_base 21: mod_base = um
  modified_base 22: mod_base = OTHER; note = 2-fluororibose cytosine
  modified_base 22..23: mod_base = OTHER; note = S-phosphorothioate
  modified_base 23: mod_base = OTHER; note = deoxyribose thymine
  modified_base 23..24: mod_base = OTHER; note = S-phosphorothioate
  modified_base 24: mod_base = OTHER; note = deoxyribose uracil (position 3 connectivity)
  modified_base 24..25: mod_base = OTHER; note = S-phosphorothioate
  modified_base 25: mod_base = OTHER; note = deoxyribose inosine
  modified_base 25..26: mod_base = OTHER; note S-N-(1,3-dimethylimidazolidin-2-ylidene)phosphoramidate
  modified_base 26: mod_base = um
  modified_base 27: mod_base = OTHER; note = 2-fluororibose cytosine
  modified_base 27..28: mod_base = OTHER; note = S-phosphorothioate
  modified_base 28: mod_base = gm
  modified_base 28..29: mod_base = OTHER; note = S-phosphorothioate
  modified_base 29: mod_base = OTHER; note = 2-O-methylribose adenine
  modified_base 29..30: mod_base = OTHER; note R-N-(1,3-dimethylimidazolidin-2-ylidene)phosphoramidate
  modified_base 30: mod_base = um
  source 1..30: mol_type = other RNA

SEQ ID NO: 739 - RNA, 30 nt, synthetic construct; identical to SEQ ID NO: 273
  misc_feature 1..30: note = Synthetic: WV-44495
  misc_feature 1..30: note = Synthetic: ADR-0104074
  modified_base 1: mod_base = cm
  modified_base 1..2: mod_base = OTHER; note R-N-(1,3-dimethylimidazolidin-2-ylidene)phosphoramidate
  modified_base 2: mod_base = cm
  modified_base 2..3: mod_base = OTHER; note = S-phosphorothioate
  modified_base 3: mod_base = cm
  modified_base 3..4: mod_base = OTHER; note = S-phosphorothioate
  modified_base 4: mod_base = OTHER; note = 2-fluororibose adenine
  modified_base 4..5: mod_base = OTHER; note = S-phosphorothioate
  modified_base 5: mod_base = OTHER; note = 2-fluororibose guanine
  modified_base 5..6: mod_base = OTHER; note = S-phosphorothioate
  modified_base 6: mod_base = OTHER; note = 2-fluororibose cytosine
  modified_base 7: mod_base = OTHER; note = 2-O-methylribose adenine
  modified_base 7..8: mod_base = OTHER; note = S-phosphorothioate
  modified_base 8: mod_base = OTHER; note = 2-fluororibose guanine
  modified_base 8..9: mod_base = OTHER; note = S-phosphorothioate
  modified_base 9: mod_base = cm
  modified_base 10: mod_base = um
  modified_base 10..11: mod_base = OTHER; note = S-phosphorothioate
  modified_base 11: mod_base = OTHER; note = 2-fluororibose uracil
  modified_base 11..12: mod_base = OTHER; note R-N-(1,3-dimethylimidazolidin-2-ylidene)phosphoramidate
  modified_base 12: mod_base = cm
  modified_base 13: mod_base = OTHER; note = 2-fluororibose adenine
  modified_base 13..14: mod_base = OTHER; note = S-phosphorothioate
  modified_base 14: mod_base = OTHER; note = 2-fluororibose guanine
  modified_base 14..15: mod_base = OTHER; note R-N-(1,3-dimethylimidazolidin-2-ylidene)phosphoramidate
  modified_base 15: mod_base = OTHER; note = 2-fluororibose uracil
  modified_base 16: mod_base = cm
  modified_base 16..17: mod_base = OTHER; note = S-phosphorothioate
  modified_base 17: mod_base = OTHER; note = 2-fluororibose cytosine
  modified_base 17..18: mod_base = OTHER; note = S-phosphorothioate
  modified_base 18: mod_base = OTHER; note = 2-fluororibose cytosine
  modified_base 18..19: mod_base = OTHER; note = S-phosphorothioate
  modified_base 19: mod_base = OTHER; note = 2-fluororibose uracil
  modified_base 19..20: mod_base = OTHER; note R-N-(1,3-dimethylimidazolidin-2-ylidene)phosphoramidate
  modified_base 20: mod_base = OTHER; note = 2-fluororibose uracil
  modified_base 20..21: mod_base = OTHER; note = S-phosphorothioate
  modified_base 21: mod_base = um
  modified_base 22: mod_base = OTHER; note = 2-fluororibose cytosine
  modified_base 22..23: mod_base = OTHER; note = S-phosphorothioate
  modified_base 23: mod_base = OTHER; note = deoxyribose thymine
  modified_base 23..24: mod_base = OTHER; note = S-phosphorothioate
  modified_base 24: mod_base = OTHER; note = deoxyribose uracil (position 3 connectivity)
  modified_base 24..25: mod_base = OTHER; note = S-phosphorothioate
  modified_base 25: mod_base = OTHER; note = deoxyribose inosine
  modified_base 25..26: mod_base = OTHER; note S-N-(1,3-dimethylimidazolidin-2-ylidene)phosphoramidate
  modified_base 26: mod_base = um
  modified_base 27: mod_base = OTHER; note = 2-fluororibose cytosine
  modified_base 27..28: mod_base = OTHER; note = S-phosphorothioate
  modified_base 28: mod_base = gm
  modified_base 28..29: mod_base = OTHER; note = S-phosphorothioate
  modified_base 29: mod_base = OTHER; note = 2-O-methylribose adenine
  modified_base 29..30: mod_base = OTHER; note R-N-(1,3-dimethylimidazolidin-2-ylidene)phosphoramidate
  modified_base 30: mod_base = um
  source 1..30: mol_type = other RNA

SEQ ID NO: 740 - RNA, 30 nt, synthetic construct; identical to SEQ ID NO: 273
  misc_feature 1..30: note = Synthetic: WV-44496
  misc_feature 1..30: note = Synthetic: ADR-0104072
  modified_base 1: mod_base = cm
  modified_base 1..2: mod_base = OTHER; note R-N-(1,3-dimethylimidazolidin-2-ylidene)phosphoramidate
  modified_base 2: mod_base = cm
  modified_base 2..3: mod_base = OTHER; note = S-phosphorothioate
  modified_base 3: mod_base = cm
  modified_base 3..4: mod_base = OTHER; note = S-phosphorothioate
  modified_base 4: mod_base = OTHER; note = 2-fluororibose adenine
  modified_base 4..5: mod_base = OTHER; note = S-phosphorothioate
  modified_base 5: mod_base = OTHER; note = 2-fluororibose guanine
  modified_base 5..6: mod_base = OTHER; note = S-phosphorothioate
  modified_base 6: mod_base = OTHER; note = 2-fluororibose cytosine
  modified_base 7: mod_base = OTHER; note = 2-O-methylribose adenine
  modified_base 7..8: mod_base = OTHER; note = S-phosphorothioate
  modified_base 8: mod_base = OTHER; note = 2-fluororibose guanine
  modified_base 8..9: mod_base = OTHER; note = S-phosphorothioate
  modified_base 9: mod_base = OTHER; note = 2-fluororibose cytosine
  modified_base 10: mod_base = um
  modified_base 10..11: mod_base = OTHER; note = S-phosphorothioate
  modified_base 11: mod_base = um
  modified_base 11..12: mod_base = OTHER; note R-N-(1,3-dimethylimidazolidin-2-ylidene)phosphoramidate
  modified_base 12: mod_base = cm
  modified_base 13: mod_base = OTHER; note = 2-fluororibose adenine
  modified_base 13..14: mod_base = OTHER; note = S-phosphorothioate
  modified_base 14: mod_base = OTHER; note = 2-fluororibose guanine
  modified_base 14..15: mod_base = OTHER; note R-N-(1,3-dimethylimidazolidin-2-ylidene)phosphoramidate
  modified_base 15: mod_base = OTHER; note = 2-fluororibose uracil
  modified_base 16: mod_base = cm
  modified_base 16..17: mod_base = OTHER; note = S-phosphorothioate
  modified_base 17: mod_base = OTHER; note = 2-fluororibose cytosine
  modified_base 17..18: mod_base = OTHER; note = S-phosphorothioate
  modified_base 18: mod_base = OTHER; note = 2-fluororibose cytosine
  modified_base 18..19: mod_base = OTHER; note = S-phosphorothioate
  modified_base 19: mod_base = OTHER; note = 2-fluororibose uracil
  modified_base 19..20: mod_base = OTHER; note R-N-(1,3-dimethylimidazolidin-2-ylidene)phosphoramidate
  modified_base 20: mod_base = OTHER; note = 2-fluororibose uracil
  modified_base 20..21: mod_base = OTHER; note = S-phosphorothioate
  modified_base 21: mod_base = um
  modified_base 22: mod_base = OTHER; note = 2-fluororibose cytosine
  modified_base 22..23: mod_base = OTHER; note = S-phosphorothioate
  modified_base 23: mod_base = OTHER; note = deoxyribose thymine
  modified_base 23..24: mod_base = OTHER; note = S-phosphorothioate
  modified_base 24: mod_base = OTHER; note = deoxyribose uracil (position 3 connectivity)
  modified_base 24..25: mod_base = OTHER; note = S-phosphorothioate
  modified_base 25: mod_base = OTHER; note = deoxyribose inosine
  modified_base 25..26: mod_base = OTHER; note S-N-(1,3-dimethylimidazolidin-2-ylidene)phosphoramidate
  modified_base 26: mod_base = um
  modified_base 27: mod_base = OTHER; note = 2-fluororibose cytosine
  modified_base 27..28: mod_base = OTHER; note = S-phosphorothioate
  modified_base 28: mod_base = gm
  modified_base 28..29: mod_base = OTHER; note = S-phosphorothioate
  modified_base 29: mod_base = OTHER; note = 2-O-methylribose adenine
  modified_base 29..30: mod_base = OTHER; note R-N-(1,3-dimethylimidazolidin-2-ylidene)phosphoramidate
  modified_base 30: mod_base = um
  source 1..30: mol_type = other RNA

SEQ ID NO: 741 - RNA, 30 nt, synthetic construct; identical to SEQ ID NO: 273
  misc_feature 1..30: note = Synthetic: WV-44497
  misc_feature 1..30: note = Synthetic: ADR-0104071
  modified_base 1: mod_base = cm
  modified_base 1..2: mod_base = OTHER; note R-N-(1,3-dimethylimidazolidin-2-ylidene)phosphoramidate
  modified_base 2: mod_base = cm
  modified_base 2..3: mod_base = OTHER; note = S-phosphorothioate
  modified_base 3: mod_base = cm
  modified_base 3..4: mod_base = OTHER; note = S-phosphorothioate
  modified_base 4: mod_base = OTHER; note = 2-fluororibose adenine
  modified_base 4..5: mod_base = OTHER; note = S-phosphorothioate
  modified_base 5: mod_base = OTHER; note = 2-fluororibose guanine
  modified_base 5..6: mod_base = OTHER; note = S-phosphorothioate
  modified_base 6: mod_base = OTHER; note = 2-fluororibose cytosine
  modified_base 7: mod_base = OTHER; note = 2-O-methylribose adenine
  modified_base 7..8: mod_base = OTHER; note = S-phosphorothioate
  modified_base 8: mod_base = OTHER; note = 2-fluororibose guanine
  modified_base 8..9: mod_base = OTHER; note = S-phosphorothioate
  modified_base 9: mod_base = OTHER; note = 2-fluororibose cytosine
  modified_base 10: mod_base = um
  modified_base 10..11: mod_base = OTHER; note = S-phosphorothioate
  modified_base 11: mod_base = OTHER; note = 2-fluororibose uracil
  modified_base 11..12: mod_base = OTHER; note R-N-(1,3-dimethylimidazolidin-2-ylidene)phosphoramidate
  modified_base 12: mod_base = cm
  modified_base 13: mod_base = OTHER; note = 2-O-methylribose adenine
  modified_base 14: mod_base = OTHER; note = 2-fluororibose guanine
  modified_base 14..15: mod_base = OTHER; note R-N-(1,3-dimethylimidazolidin-2-ylidene)phosphoramidate
  modified_base 15: mod_base = OTHER; note = 2-fluororibose uracil
  modified_base 16: mod_base = cm
  modified_base 16..17: mod_base = OTHER; note = S-phosphorothioate
  modified_base 17: mod_base = OTHER; note = 2-fluororibose cytosine
  modified_base 17..18: mod_base = OTHER; note = S-phosphorothioate
  modified_base 18: mod_base = OTHER; note = 2-fluororibose cytosine
  modified_base 18..19: mod_base = OTHER; note = S-phosphorothioate
  modified_base 19: mod_base = OTHER; note = 2-fluororibose uracil
  modified_base 19..20: mod_base = OTHER; note R-N-(1,3-dimethylimidazolidin-2-ylidene)phosphoramidate
  modified_base 20: mod_base = OTHER; note = 2-fluororibose uracil
  modified_base 20..21: mod_base = OTHER; note = S-phosphorothioate
  modified_base 21: mod_base = um
  modified_base 22: mod_base = OTHER; note = 2-fluororibose cytosine
  modified_base 22..23: mod_base = OTHER; note = S-phosphorothioate
  modified_base 23: mod_base = OTHER; note = deoxyribose thymine
  modified_base 23..24: mod_base = OTHER; note = S-phosphorothioate
  modified_base 24: mod_base = OTHER; note = deoxyribose uracil (position 3 connectivity)
  modified_base 24..25: mod_base = OTHER; note = S-phosphorothioate
  modified_base 25: mod_base = OTHER; note = deoxyribose inosine
  modified_base 25..26: mod_base = OTHER; note S-N-(1,3-dimethylimidazolidin-2-ylidene)phosphoramidate
  modified_base 26: mod_base = um
  modified_base 27: mod_base = OTHER; note = 2-fluororibose cytosine
  modified_base 27..28: mod_base = OTHER; note = S-phosphorothioate
  modified_base 28: mod_base = gm
  modified_base 28..29: mod_base = OTHER; note = S-phosphorothioate
  modified_base 29: mod_base = OTHER; note = 2-O-methylribose adenine
  modified_base 29..30: mod_base = OTHER; note R-N-(1,3-dimethylimidazolidin-2-ylidene)phosphoramidate
  modified_base 30: mod_base = um
  source 1..30: mol_type = other RNA

SEQ ID NO: 742 - RNA, 30 nt, synthetic construct; identical to SEQ ID NO: 273
  misc_feature 1..30: note = Synthetic: WV-44498
  misc_feature 1..30: note = Synthetic: ADR-0104069
  modified_base 1: mod_base = cm
  modified_base 1..2: mod_base = OTHER; note R-N-(1,3-dimethylimidazolidin-2-ylidene)phosphoramidate
  modified_base 2: mod_base = cm
  modified_base 2..3: mod_base = OTHER; note = S-phosphorothioate
  modified_base 3: mod_base = cm
  modified_base 3..4: mod_base = OTHER; note = S-phosphorothioate
  modified_base 4: mod_base = OTHER; note = 2-fluororibose adenine
  modified_base 4..5: mod_base = OTHER; note = S-phosphorothioate
  modified_base 5: mod_base = OTHER; note = 2-fluororibose guanine
  modified_base 5..6: mod_base = OTHER; note = S-phosphorothioate
  modified_base 6: mod_base = OTHER; note = 2-fluororibose cytosine
  modified_base 7: mod_base = OTHER; note = 2-O-methylribose adenine
  modified_base 7..8: mod_base = OTHER; note = S-phosphorothioate
  modified_base 8: mod_base = OTHER; note = 2-fluororibose guanine
  modified_base 8..9: mod_base = OTHER; note = S-phosphorothioate
  modified_base 9: mod_base = OTHER; note = 2-fluororibose cytosine
  modified_base 10: mod_base = um
  modified_base 10..11: mod_base = OTHER; note = S-phosphorothioate
  modified_base 11: mod_base = OTHER; note = 2-fluororibose uracil
  modified_base 11..12: mod_base = OTHER; note R-N-(1,3-dimethylimidazolidin-2-ylidene)phosphoramidate
  modified_base 12: mod_base = cm
  modified_base 13: mod_base = OTHER; note = 2-fluororibose adenine
  modified_base 13..14: mod_base = OTHER; note = S-phosphorothioate
  modified_base 14: mod_base = gm
  modified_base 14..15: mod_base = OTHER; note R-N-(1,3-dimethylimidazolidin-2-ylidene)phosphoramidate
  modified_base 15: mod_base = OTHER; note = 2-fluororibose uracil
  modified_base 16: mod_base = cm
  modified_base 16..17: mod_base = OTHER; note = S-phosphorothioate
  modified_base 17: mod_base = OTHER; note = 2-fluororibose cytosine
  modified_base 17..18: mod_base = OTHER; note = S-phosphorothioate
  modified_base 18: mod_base = OTHER; note = 2-fluororibose cytosine
  modified_base 18..19: mod_base = OTHER; note = S-phosphorothioate
  modified_base 19: mod_base = OTHER; note = 2-fluororibose uracil
  modified_base 19..20: mod_base = OTHER; note R-N-(1,3-dimethylimidazolidin-2-ylidene)phosphoramidate
  modified_base 20: mod_base = OTHER; note = 2-fluororibose uracil
  modified_base 20..21: mod_base = OTHER; note = S-phosphorothioate
  modified_base 21: mod_base = um
  modified_base 22: mod_base = OTHER; note = 2-fluororibose cytosine
  modified_base 22..23: mod_base = OTHER; note = S-phosphorothioate
  modified_base 23: mod_base = OTHER; note = deoxyribose thymine
  modified_base 23..24: mod_base = OTHER; note = S-phosphorothioate
  modified_base 24: mod_base = OTHER; note = deoxyribose uracil (position 3 connectivity)
  modified_base 24..25: mod_base = OTHER; note = S-phosphorothioate
  modified_base 25: mod_base = OTHER; note = deoxyribose inosine
  modified_base 25..26: mod_base = OTHER; note S-N-(1,3-dimethylimidazolidin-2-ylidene)phosphoramidate
  modified_base 26: mod_base = um
  modified_base 27: mod_base = OTHER; note = 2-fluororibose cytosine
  modified_base 27..28: mod_base = OTHER; note = S-phosphorothioate
  modified_base 28: mod_base = gm
  modified_base 28..29: mod_base = OTHER; note = S-phosphorothioate
  modified_base 29: mod_base = OTHER; note = 2-O-methylribose adenine
  modified_base 29..30: mod_base = OTHER; note R-N-(1,3-dimethylimidazolidin-2-ylidene)phosphoramidate
  modified_base 30: mod_base = um
  source 1..30: mol_type = other RNA

SEQ ID NO: 743 - RNA, 30 nt, synthetic construct; identical to SEQ ID NO: 273
  misc_feature 1..30: note = Synthetic: WV-44499
  misc_feature 1..30: note = Synthetic: ADR-0104068
  modified_base 1: mod_base = cm
  modified_base 1..2: mod_base = OTHER; note R-N-(1,3-dimethylimidazolidin-2-ylidene)phosphoramidate
  modified_base 2: mod_base = cm
  modified_base 2..3: mod_base = OTHER; note = S-phosphorothioate
  modified_base 3: mod_base = cm
  modified_base 3..4: mod_base = OTHER; note = S-phosphorothioate
  modified_base 4: mod_base = OTHER; note = 2-fluororibose adenine
  modified_base 4..5: mod_base = OTHER; note = S-phosphorothioate
  modified_base 5: mod_base = OTHER; note = 2-fluororibose guanine
  modified_base 5..6: mod_base = OTHER; note = S-phosphorothioate
  modified_base 6: mod_base = OTHER; note = 2-fluororibose cytosine
  modified_base 7: mod_base = OTHER; note = 2-O-methylribose adenine
  modified_base 7..8: mod_base = OTHER; note = S-phosphorothioate
  modified_base 8: mod_base = OTHER; note = 2-fluororibose guanine
  modified_base 8..9: mod_base = OTHER; note = S-phosphorothioate
  modified_base 9: mod_base = OTHER; note = 2-fluororibose cytosine
  modified_base 10: mod_base = um
  modified_base 10..11: mod_base = OTHER; note = S-phosphorothioate
  modified_base 11: mod_base = OTHER; note = 2-fluororibose uracil
  modified_base 11..12: mod_base = OTHER; note R-N-(1,3-dimethylimidazolidin-2-ylidene)phosphoramidate
  modified_base 12: mod_base = cm
  modified_base 13: mod_base = OTHER; note = 2-fluororibose adenine
  modified_base 13..14: mod_base = OTHER; note = S-phosphorothioate
  modified_base 14: mod_base = OTHER; note = 2-fluororibose guanine
  modified_base 14..15: mod_base = OTHER; note R-N-(1,3-dimethylimidazolidin-2-ylidene)phosphoramidate
  modified_base 15: mod_base = um
  modified_base 16: mod_base = cm
  modified_base 16..17: mod_base = OTHER; note = S-phosphorothioate
  modified_base 17: mod_base = OTHER; note = 2-fluororibose cytosine
  modified_base 17..18: mod_base = OTHER; note = S-phosphorothioate
  modified_base 18: mod_base = OTHER; note = 2-fluororibose cytosine
  modified_base 18..19: mod_base = OTHER; note = S-phosphorothioate
  modified_base 19: mod_base = OTHER; note = 2-fluororibose uracil
  modified_base 19..20: mod_base = OTHER; note R-N-(1,3-dimethylimidazolidin-2-ylidene)phosphoramidate
  modified_base 20: mod_base = OTHER; note = 2-fluororibose uracil
  modified_base 20..21: mod_base = OTHER; note = S-phosphorothioate
  modified_base 21: mod_base = um
  modified_base 22: mod_base = OTHER; note = 2-fluororibose cytosine
  modified_base 22..23: mod_base = OTHER; note = S-phosphorothioate
  modified_base 23: mod_base = OTHER; note = deoxyribose thymine
  modified_base 23..24: mod_base = OTHER; note = S-phosphorothioate
  modified_base 24: mod_base = OTHER; note = deoxyribose uracil (position 3 connectivity)
  modified_base 24..25: mod_base = OTHER; note = S-phosphorothioate
  modified_base 25: mod_base = OTHER; note = deoxyribose inosine
  modified_base 25..26: mod_base = OTHER; note S-N-(1,3-dimethylimidazolidin-2-ylidene)phosphoramidate
  modified_base 26: mod_base = um
  modified_base 27: mod_base = OTHER; note = 2-fluororibose cytosine
  modified_base 27..28: mod_base = OTHER; note = S-phosphorothioate
  modified_base 28: mod_base = gm
  modified_base 28..29: mod_base = OTHER; note = S-phosphorothioate
  modified_base 29: mod_base = OTHER; note = 2-O-methylribose adenine
  modified_base 29..30: mod_base = OTHER; note R-N-(1,3-dimethylimidazolidin-2-ylidene)phosphoramidate
  modified_base 30: mod_base = um
  source 1..30: mol_type = other RNA

SEQ ID NO: 744 - RNA, 30 nt, synthetic construct; identical to SEQ ID NO: 273
  misc_feature 1..30: note = Synthetic: WV-44500
  misc_feature 1..30: note = Synthetic: ADR-0104067
  modified_base 1: mod_base = cm
  modified_base 1..2: mod_base = OTHER; note R-N-(1,3-dimethylimidazolidin-2-ylidene)phosphoramidate
  modified_base 2: mod_base = cm
  modified_base 2..3: mod_base = OTHER; note = S-phosphorothioate
  modified_base 3: mod_base = cm
  modified_base 3..4: mod_base = OTHER; note = S-phosphorothioate
  modified_base 4: mod_base = OTHER; note = 2-fluororibose adenine
  modified_base 4..5: mod_base = OTHER; note = S-phosphorothioate
  modified_base 5: mod_base = OTHER; note = 2-fluororibose guanine
  modified_base 5..6: mod_base = OTHER; note = S-phosphorothioate
  modified_base 6: mod_base = OTHER; note = 2-fluororibose cytosine
  modified_base 7: mod_base = OTHER; note = 2-O-methylribose adenine
  modified_base 7..8: mod_base = OTHER; note = S-phosphorothioate
  modified_base 8: mod_base = OTHER; note = 2-fluororibose guanine
  modified_base 8..9: mod_base = OTHER; note = S-phosphorothioate
  modified_base 9: mod_base = OTHER; note = 2-fluororibose cytosine
  modified_base 10: mod_base = um
  modified_base 10..11: mod_base = OTHER; note = S-phosphorothioate
  modified_base 11: mod_base = OTHER; note = 2-fluororibose uracil
  modified_base 11..12: mod_base = OTHER; note R-N-(1,3-dimethylimidazolidin-2-ylidene)phosphoramidate
  modified_base 12: mod_base = cm
  modified_base 13: mod_base = OTHER; note = 2-fluororibose adenine
  modified_base 13..14: mod_base = OTHER; note = S-phosphorothioate
  modified_base 14: mod_base = OTHER; note = 2-fluororibose guanine
  modified_base 14..15: mod_base = OTHER; note R-N-(1,3-dimethylimidazolidin-2-ylidene)phosphoramidate
  modified_base 15: mod_base = OTHER; note = 2-fluororibose uracil
  modified_base 16: mod_base = cm
  modified_base 16..17: mod_base = OTHER; note = S-phosphorothioate
  modified_base 17: mod_base = cm
  modified_base 18: mod_base = OTHER; note = 2-fluororibose cytosine
  modified_base 18..19: mod_base = OTHER; note = S-phosphorothioate
  modified_base 19: mod_base = OTHER; note = 2-fluororibose uracil
  modified_base 19..20: mod_base = OTHER; note R-N-(1,3-dimethylimidazolidin-2-ylidene)phosphoramidate
  modified_base 20: mod_base = OTHER; note = 2-fluororibose uracil
  modified_base 20..21: mod_base = OTHER; note = S-phosphorothioate
  modified_base 21: mod_base = um
  modified_base 22: mod_base = OTHER; note = 2-fluororibose cytosine
  modified_base 22..23: mod_base = OTHER; note = S-phosphorothioate
  modified_base 23: mod_base = OTHER; note = deoxyribose thymine
  modified_base 23..24: mod_base = OTHER; note = S-phosphorothioate
  modified_base 24: mod_base = OTHER; note = deoxyribose uracil (position 3 connectivity)
  modified_base 24..25: mod_base = OTHER; note = S-phosphorothioate
  modified_base 25: mod_base = OTHER; note = deoxyribose inosine
  modified_base 25..26: mod_base = OTHER; note S-N-(1,3-dimethylimidazolidin-2-ylidene)phosphoramidate
  modified_base 26: mod_base = um
  modified_base 27: mod_base = OTHER; note = 2-fluororibose cytosine
  modified_base 27..28: mod_base = OTHER; note = S-phosphorothioate
  modified_base 28: mod_base = gm
  modified_base 28..29: mod_base = OTHER; note = S-phosphorothioate
  modified_base 29: mod_base = OTHER; note = 2-O-methylribose adenine
  modified_base 29..30: mod_base = OTHER; note R-N-(1,3-dimethylimidazolidin-2-ylidene)phosphoramidate
  modified_base 30: mod_base = um
  source 1..30: mol_type = other RNA

SEQ ID NO: 745 - RNA, 30 nt, synthetic construct; identical to SEQ ID NO: 273
  misc_feature 1..30: note = Synthetic: WV-44501
  misc_feature 1..30: note = Synthetic: ADR-0104066
  modified_base 1: mod_base = cm
  modified_base 1..2: mod_base = OTHER; note R-N-(1,3-dimethylimidazolidin-2-ylidene)phosphoramidate
  modified_base 2: mod_base = cm
  modified_base 2..3: mod_base = OTHER; note = S-phosphorothioate
  modified_base 3: mod_base = cm
  modified_base 3..4: mod_base = OTHER; note = S-phosphorothioate
  modified_base 4: mod_base = OTHER; note = 2-fluororibose adenine
  modified_base 4..5: mod_base = OTHER; note = S-phosphorothioate
  modified_base 5: mod_base = OTHER; note = 2-fluororibose guanine
  modified_base 5..6: mod_base = OTHER; note = S-phosphorothioate
  modified_base 6: mod_base = OTHER; note = 2-fluororibose cytosine
  modified_base 7: mod_base = OTHER; note = 2-O-methylribose adenine
  modified_base 7..8: mod_base = OTHER; note = S-phosphorothioate
  modified_base 8: mod_base = OTHER; note = 2-fluororibose guanine
  modified_base 8..9: mod_base = OTHER; note = S-phosphorothioate
  modified_base 9: mod_base = OTHER; note = 2-fluororibose cytosine
  modified_base 10: mod_base = um
  modified_base 10..11: mod_base = OTHER; note = S-phosphorothioate
  modified_base 11: mod_base = OTHER; note = 2-fluororibose uracil
  modified_base 11..12: mod_base = OTHER; note R-N-(1,3-dimethylimidazolidin-2-ylidene)phosphoramidate
  modified_base 12: mod_base = cm
  modified_base 13: mod_base = OTHER; note = 2-fluororibose adenine
  modified_base 13..14: mod_base = OTHER; note = S-phosphorothioate
  modified_base 14: mod_base = OTHER; note = 2-fluororibose guanine
  modified_base 14..15: mod_base = OTHER; note R-N-(1,3-dimethylimidazolidin-2-ylidene)phosphoramidate
  modified_base 15: mod_base = OTHER; note = 2-fluororibose uracil
  modified_base 16: mod_base = cm
  modified_base 16..17: mod_base = OTHER; note = S-phosphorothioate
  modified_base 17: mod_base = OTHER; note = 2-fluororibose cytosine
  modified_base 17..18: mod_base = OTHER; note = S-phosphorothioate
  modified_base 18: mod_base = cm
  modified_base 19: mod_base = OTHER; note = 2-fluororibose uracil
  modified_base 19..20: mod_base = OTHER; note R-N-(1,3-dimethylimidazolidin-2-ylidene)phosphoramidate
  modified_base 20: mod_base = OTHER; note = 2-fluororibose uracil
  modified_base 20..21: mod_base = OTHER; note = S-phosphorothioate
  modified_base 21: mod_base = um
  modified_base 22: mod_base = OTHER; note = 2-fluororibose cytosine
  modified_base 22..23: mod_base = OTHER; note = S-phosphorothioate
  modified_base 23: mod_base = OTHER; note = deoxyribose thymine
  modified_base 23..24: mod_base = OTHER; note = S-phosphorothioate
  modified_base 24: mod_base = OTHER; note = deoxyribose uracil (position 3 connectivity)
  modified_base 24..25: mod_base = OTHER; note = S-phosphorothioate
  modified_base 25: mod_base = OTHER; note = deoxyribose inosine
  modified_base 25..26: mod_base = OTHER; note S-N-(1,3-dimethylimidazolidin-2-ylidene)phosphoramidate
  modified_base 26: mod_base = um
  modified_base 27: mod_base = OTHER; note = 2-fluororibose cytosine
  modified_base 27..28: mod_base = OTHER; note = S-phosphorothioate
  modified_base 28: mod_base = gm
  modified_base 28..29: mod_base = OTHER; note = S-phosphorothioate
  modified_base 29: mod_base = OTHER; note = 2-O-methylribose adenine
  modified_base 29..30: mod_base = OTHER; note R-N-(1,3-dimethylimidazolidin-2-ylidene)phosphoramidate
  modified_base 30: mod_base = um
  source 1..30: mol_type = other RNA

SEQ ID NO: 746 - RNA, 30 nt, synthetic construct; identical to SEQ ID NO: 273
  misc_feature 1..30: note = Synthetic: WV-44502
  misc_feature 1..30: note = Synthetic: ADR-0104065
  modified_base 1: mod_base = cm
  modified_base 1..2: mod_base = OTHER; note R-N-(1,3-dimethylimidazolidin-2-ylidene)phosphoramidate
  modified_base 2: mod_base = cm
  modified_base 2..3: mod_base = OTHER; note = S-phosphorothioate
  modified_base 3: mod_base = cm
  modified_base 3..4: mod_base = OTHER; note = S-phosphorothioate
  modified_base 4: mod_base = OTHER; note = 2-fluororibose adenine
  modified_base 4..5: mod_base = OTHER; note = S-phosphorothioate
  modified_base 5: mod_base = OTHER; note = 2-fluororibose guanine
  modified_base 5..6: mod_base = OTHER; note = S-phosphorothioate
  modified_base 6: mod_base = OTHER; note = 2-fluororibose cytosine
  modified_base 7: mod_base = OTHER; note = 2-O-methylribose adenine
  modified_base 7..8: mod_base = OTHER; note = S-phosphorothioate
  modified_base 8: mod_base = OTHER; note = 2-fluororibose guanine
  modified_base 8..9: mod_base = OTHER; note = S-phosphorothioate
  modified_base 9: mod_base = OTHER; note = 2-fluororibose cytosine
  modified_base 10: mod_base = um
  modified_base 10..11: mod_base = OTHER; note = S-phosphorothioate
  modified_base 11: mod_base = OTHER; note = 2-fluororibose uracil
  modified_base 11..12: mod_base = OTHER; note R-N-(1,3-dimethylimidazolidin-2-ylidene)phosphoramidate
  modified_base 12: mod_base = cm
  modified_base 13: mod_base = OTHER; note = 2-fluororibose adenine
  modified_base 13..14: mod_base = OTHER; note = S-phosphorothioate
  modified_base 14: mod_base = OTHER; note = 2-fluororibose guanine
  modified_base 14..15: mod_base = OTHER; note R-N-(1,3-dimethylimidazolidin-2-ylidene)phosphoramidate
  modified_base 15: mod_base = OTHER; note = 2-fluororibose uracil
  modified_base 16: mod_base = cm
  modified_base 16..17: mod_base = OTHER; note = S-phosphorothioate
  modified_base 17: mod_base = OTHER; note = 2-fluororibose cytosine
  modified_base 17..18: mod_base = OTHER; note = S-phosphorothioate
  modified_base 18: mod_base = OTHER; note = 2-fluororibose cytosine
  modified_base 18..19: mod_base = OTHER; note = S-phosphorothioate
  modified_base 19: mod_base = um
  modified_base 19..20: mod_base = OTHER; note R-N-(1,3-dimethylimidazolidin-2-ylidene)phosphoramidate
  modified_base 20: mod_base = OTHER; note = 2-fluororibose uracil
  modified_base 20..21: mod_base = OTHER; note = S-phosphorothioate
  modified_base 21: mod_base = um
  modified_base 22: mod_base = OTHER; note = 2-fluororibose cytosine
  modified_base 22..23: mod_base = OTHER; note = S-phosphorothioate
  modified_base 23: mod_base = OTHER; note = deoxyribose thymine
  modified_base 23..24: mod_base = OTHER; note = S-phosphorothioate
  modified_base 24: mod_base = OTHER; note = deoxyribose uracil (position 3 connectivity)
  modified_base 24..25: mod_base = OTHER; note = S-phosphorothioate
  modified_base 25: mod_base = OTHER; note = deoxyribose inosine
  modified_base 25..26: mod_base = OTHER; note S-N-(1,3-dimethylimidazolidin-2-ylidene)phosphoramidate
  modified_base 26: mod_base = um
  modified_base 27: mod_base = OTHER; note = 2-fluororibose cytosine
  modified_base 27..28: mod_base = OTHER; note = S-phosphorothioate
  modified_base 28: mod_base = gm
  modified_base 28..29: mod_base = OTHER; note = S-phosphorothioate
  modified_base 29: mod_base = OTHER; note = 2-O-methylribose adenine
  modified_base 29..30: mod_base = OTHER; note R-N-(1,3-dimethylimidazolidin-2-ylidene)phosphoramidate
  modified_base 30: mod_base = um
  source 1..30: mol_type = other RNA

SEQ ID NO: 747 - RNA, 30 nt, synthetic construct; identical to SEQ ID NO: 273
  misc_feature 1..30: note = Synthetic: WV-44503
  misc_feature 1..30: note = Synthetic: ADR-0104064
  modified_base 1: mod_base = cm
  modified_base 1..2: mod_base = OTHER; note R-N-(1,3-dimethylimidazolidin-2-ylidene)phosphoramidate
  modified_base 2: mod_base = cm
  modified_base 2..3: mod_base = OTHER; note = S-phosphorothioate
  modified_base 3: mod_base = cm
  modified_base 3..4: mod_base = OTHER; note = S-phosphorothioate
  modified_base 4: mod_base = OTHER; note = 2-fluororibose adenine
  modified_base 4..5: mod_base = OTHER; note = S-phosphorothioate
  modified_base 5: mod_base = OTHER; note = 2-fluororibose guanine
  modified_base 5..6: mod_base = OTHER; note = S-phosphorothioate
  modified_base 6: mod_base = OTHER; note = 2-fluororibose cytosine
  modified_base 7: mod_base = OTHER; note = 2-O-methylribose adenine
  modified_base 7..8: mod_base = OTHER; note = S-phosphorothioate
  modified_base 8: mod_base = OTHER; note = 2-fluororibose guanine
  modified_base 8..9: mod_base = OTHER; note = S-phosphorothioate
  modified_base 9: mod_base = OTHER; note = 2-fluororibose cytosine
  modified_base 10: mod_base = um
  modified_base 10..11: mod_base = OTHER; note = S-phosphorothioate
  modified_base 11: mod_base = OTHER; note = 2-fluororibose uracil
  modified_base 11..12: mod_base = OTHER; note R-N-(1,3-dimethylimidazolidin-2-ylidene)phosphoramidate
  modified_base 12: mod_base = cm
  modified_base 13: mod_base = OTHER; note = 2-fluororibose adenine
  modified_base 13..14: mod_base = OTHER; note = S-phosphorothioate
  modified_base 14: mod_base = OTHER; note = 2-fluororibose guanine
  modified_base 14..15: mod_base = OTHER; note R-N-(1,3-dimethylimidazolidin-2-ylidene)phosphoramidate
  modified_base 15: mod_base = OTHER; note = 2-fluororibose uracil
  modified_base 16: mod_base = cm
  modified_base 16..17: mod_base = OTHER; note = S-phosphorothioate
  modified_base 17: mod_base = OTHER; note = 2-fluororibose cytosine
  modified_base 17..18: mod_base = OTHER; note = S-phosphorothioate
  modified_base 18: mod_base = OTHER; note = 2-fluororibose cytosine
  modified_base 18..19: mod_base = OTHER; note = S-phosphorothioate
  modified_base 19: mod_base = OTHER; note = 2-fluororibose uracil
  modified_base 19..20: mod_base = OTHER; note R-N-(1,3-dimethylimidazolidin-2-ylidene)phosphoramidate
  modified_base 20: mod_base = um
  modified_base 21: mod_base = um
  modified_base 22: mod_base = OTHER; note = 2-fluororibose cytosine
  modified_base 22..23: mod_base = OTHER; note = S-phosphorothioate
  modified_base 23: mod_base = OTHER; note = deoxyribose thymine
  modified_base 23..24: mod_base = OTHER; note = S-phosphorothioate
  modified_base 24: mod_base = OTHER; note = deoxyribose uracil (position 3 connectivity)
  modified_base 24..25: mod_base = OTHER; note = S-phosphorothioate
  modified_base 25: mod_base = OTHER; note = deoxyribose inosine
  modified_base 25..26: mod_base = OTHER; note S-N-(1,3-dimethylimidazolidin-2-ylidene)phosphoramidate
  modified_base 26: mod_base = um
  modified_base 27: mod_base = OTHER; note = 2-fluororibose cytosine
  modified_base 27..28: mod_base = OTHER; note = S-phosphorothioate
  modified_base 28: mod_base = gm
  modified_base 28..29: mod_base = OTHER; note = S-phosphorothioate
  modified_base 29: mod_base = OTHER; note = 2-O-methylribose adenine
  modified_base 29..30: mod_base = OTHER; note R-N-(1,3-dimethylimidazolidin-2-ylidene)phosphoramidate
  modified_base 30: mod_base = um
  source 1..30: mol_type = other RNA

SEQ ID NO: 748 - RNA, 30 nt, synthetic construct; identical to SEQ ID NO: 273
  misc_feature 1..30: note = Synthetic: WV-44505
  misc_feature 1..30: note = Synthetic: ADR-0104108
  modified_base 1: mod_base = cm
  modified_base 1..2: mod_base = OTHER; note R-N-(1,3-dimethylimidazolidin-2-ylidene)phosphoramidate
  modified_base 2: mod_base = cm
  modified_base 2..3: mod_base = OTHER; note = S-phosphorothioate
  modified_base 3: mod_base = cm
  modified_base 3..4: mod_base = OTHER; note = S-phosphorothioate
  modified_base 4: mod_base = OTHER; note = 2-fluororibose adenine
  modified_base 4..5: mod_base = OTHER; note = S-phosphorothioate
  modified_base 5: mod_base = OTHER; note = 2-fluororibose guanine
  modified_base 5..6: mod_base = OTHER; note = S-phosphorothioate
  modified_base 6: mod_base = cm
  modified_base 7: mod_base = OTHER; note = 2-fluororibose adenine
  modified_base 7..8: mod_base = OTHER; note = S-phosphorothioate
  modified_base 8: mod_base = OTHER; note = 2-fluororibose guanine
  modified_base 8..9: mod_base = OTHER; note = S-phosphorothioate
  modified_base 9: mod_base = OTHER; note = 2-fluororibose cytosine
  modified_base 9..10: mod_base = OTHER; note = S-phosphorothioate
  modified_base 10: mod_base = OTHER; note = 2-fluororibose uracil
  modified_base 10..11: mod_base = OTHER; note = S-phosphorothioate
  modified_base 11: mod_base = OTHER; note = 2-fluororibose uracil
  modified_base 11..12: mod_base = OTHER; note R-N-(1,3-dimethylimidazolidin-2-ylidene)phosphoramidate
  modified_base 12: mod_base = OTHER; note = 2-fluororibose cytosine
  modified_base 12..13: mod_base = OTHER; note = S-phosphorothioate
  modified_base 13: mod_base = OTHER; note = 2-fluororibose adenine
  modified_base 14: mod_base = OTHER; note = 2-fluororibose guanine
  modified_base 14..15: mod_base = OTHER; note R-N-(1,3-dimethylimidazolidin-2-ylidene)phosphoramidate
  modified_base 15: mod_base = OTHER; note = 2-fluororibose uracil
  modified_base 15..16: mod_base = OTHER; note = S-phosphorothioate
  modified_base 16: mod_base = OTHER; note = 2-fluororibose cytosine
  modified_base 16..17: mod_base = OTHER; note = S-phosphorothioate
  modified_base 17: mod_base = OTHER; note = 2-fluororibose cytosine
  modified_base 17..18: mod_base = OTHER; note = S-phosphorothioate
  modified_base 18: mod_base = OTHER; note = 2-fluororibose cytosine
  modified_base 18..19: mod_base = OTHER; note = S-phosphorothioate
  modified_base 19: mod_base = OTHER; note = 2-fluororibose uracil
  modified_base 19..20: mod_base = OTHER; note = S-phosphorothioate
  modified_base 20: mod_base = um
  modified_base 21: mod_base = OTHER; note = 2-fluororibose uracil
  modified_base 21..22: mod_base = OTHER; note = S-phosphorothioate
  modified_base 22: mod_base = OTHER; note = 2-fluororibose cytosine
  modified_base 22..23: mod_base = OTHER; note = S-phosphorothioate
  modified_base 23: mod_base = OTHER; note = deoxyribose thymine
  modified_base 23..24: mod_base = OTHER; note = S-phosphorothioate
  modified_base 24: mod_base = OTHER; note = deoxyribose uracil (position 3 connectivity)
  modified_base 24..25: mod_base = OTHER; note = S-phosphorothioate
  modified_base 25: mod_base = OTHER; note = deoxyribose inosine
  modified_base 25..26: mod_base = OTHER; note S-N-(1,3-dimethylimidazolidin-2-ylidene)phosphoramidate
  modified_base 26: mod_base = um
  modified_base 27: mod_base = OTHER; note = 2-fluororibose cytosine
  modified_base 27..28: mod_base = OTHER; note = S-phosphorothioate
  modified_base 28: mod_base = gm
  modified_base 28..29: mod_base = OTHER; note = S-phosphorothioate
  modified_base 29: mod_base = OTHER; note = 2-O-methylribose adenine
  modified_base 29..30: mod_base = OTHER; note R-N-(1,3-dimethylimidazolidin-2-ylidene)phosphoramidate
  modified_base 30: mod_base = um
  source 1..30: mol_type = other RNA

SEQ ID NO: 749 - RNA, 30 nt, synthetic construct; identical to SEQ ID NO: 273
  misc_feature 1..30: note = Synthetic: WV-44506
  misc_feature 1..30: note = Synthetic: ADR-0104256
  modified_base 1: mod_base = cm
  modified_base 1..2: mod_base = OTHER; note R-N-(1,3-dimethylimidazolidin-2-ylidene)phosphoramidate
  modified_base 2: mod_base = cm
  modified_base 2..3: mod_base = OTHER; note = S-phosphorothioate
  modified_base 3: mod_base = cm
  modified_base 3..4: mod_base = OTHER; note = S-phosphorothioate
  modified_base 4: mod_base = OTHER; note = 2-fluororibose adenine
  modified_base 4..5: mod_base = OTHER; note = S-phosphorothioate
  modified_base 5: mod_base = OTHER; note = 2-fluororibose guanine
  modified_base 5..6: mod_base = OTHER; note = S-phosphorothioate
  modified_base 6: mod_base = cm
  modified_base 7: mod_base = OTHER; note = 2-O-methylribose adenine
  modified_base 8: mod_base = OTHER; note = 2-fluororibose guanine
  modified_base 8..9: mod_base = OTHER; note = S-phosphorothioate
  modified_base 9: mod_base = OTHER; note = 2-fluororibose cytosine
  modified_base 9..10: mod_base = OTHER; note = S-phosphorothioate
  modified_base 10: mod_base = OTHER; note = 2-fluororibose uracil
  modified_base 10..11: mod_base = OTHER; note = S-phosphorothioate
  modified_base 11: mod_base = OTHER; note = 2-fluororibose uracil
  modified_base 11..12: mod_base = OTHER; note R-N-(1,3-dimethylimidazolidin-2-ylidene)phosphoramidate
  modified_base 12: mod_base = OTHER; note = 2-fluororibose cytosine
  modified_base 12..13: mod_base = OTHER; note = S-phosphorothioate
  modified_base 13: mod_base = OTHER; note = 2-fluororibose adenine
  modified_base 14: mod_base = OTHER; note = 2-fluororibose guanine
  modified_base 14..15: mod_base = OTHER; note R-N-(1,3-dimethylimidazolidin-2-ylidene)phosphoramidate
  modified_base 15: mod_base = OTHER; note = 2-fluororibose uracil
  modified_base 15..16: mod_base = OTHER; note = S-phosphorothioate
  modified_base 16: mod_base = OTHER; note = 2-fluororibose cytosine
  modified_base 16..17: mod_base = OTHER; note = S-phosphorothioate
  modified_base 17: mod_base = OTHER; note = 2-fluororibose cytosine
  modified_base 17..18: mod_base = OTHER; note = S-phosphorothioate
  modified_base 18: mod_base = OTHER; note = 2-fluororibose cytosine
  modified_base 18..19: mod_base = OTHER; note = S-phosphorothioate
  modified_base 19: mod_base = OTHER; note = 2-fluororibose uracil
  modified_base 19..20: mod_base = OTHER; note = S-phosphorothioate
  modified_base 20: mod_base = um
  modified_base 21: mod_base = um
  modified_base 21..22: mod_base = OTHER; note = S-phosphorothioate
  modified_base 22: mod_base = OTHER; note = 2-fluororibose cytosine
  modified_base 22..23: mod_base = OTHER; note = S-phosphorothioate
  modified_base 23: mod_base = OTHER; note = deoxyribose thymine
  modified_base 23..24: mod_base = OTHER; note = S-phosphorothioate
  modified_base 24: mod_base = OTHER; note = deoxyribose uracil (position 3 connectivity)
  modified_base 24..25: mod_base = OTHER; note = S-phosphorothioate
  modified_base 25: mod_base = OTHER; note = deoxyribose inosine
  modified_base 25..26: mod_base = OTHER; note S-N-(1,3-dimethylimidazolidin-2-ylidene)phosphoramidate
  modified_base 26: mod_base = um
  modified_base 27: mod_base = OTHER; note = 2-fluororibose cytosine
  modified_base 27..28: mod_base = OTHER; note = S-phosphorothioate
  modified_base 28: mod_base = gm
  modified_base 28..29: mod_base = OTHER; note = S-phosphorothioate
  modified_base 29: mod_base = OTHER; note = 2-O-methylribose adenine
  modified_base 29..30: mod_base = OTHER; note R-N-(1,3-dimethylimidazolidin-2-ylidene)phosphoramidate
  modified_base 30: mod_base = um
  source 1..30: mol_type = other RNA

SEQ ID NO: 750 - RNA, 30 nt, synthetic construct; identical to SEQ ID NO: 273
  misc_feature 1..30: note = Synthetic: WV-44507
  misc_feature 1..30: note = Synthetic: ADR-0104258
  modified_base 1: mod_base = cm
  modified_base 1..2: mod_base = OTHER; note R-N-(1,3-dimethylimidazolidin-2-ylidene)phosphoramidate
  modified_base 2: mod_base = cm
  modified_base 2..3: mod_base = OTHER; note = S-phosphorothioate
  modified_base 3: mod_base = cm
  modified_base 3..4: mod_base = OTHER; note = S-phosphorothioate
  modified_base 4: mod_base = OTHER; note = 2-fluororibose adenine
  modified_base 4..5: mod_base = OTHER; note = S-phosphorothioate
  modified_base 5: mod_base = OTHER; note = 2-fluororibose guanine
  modified_base 5..6: mod_base = OTHER; note = S-phosphorothioate
  modified_base 6: mod_base = cm
  modified_base 7: mod_base = OTHER; note = 2-O-methylribose adenine
  modified_base 8: mod_base = OTHER; note = 2-fluororibose guanine
  modified_base 8..9: mod_base = OTHER; note = S-phosphorothioate
  modified_base 9: mod_base = OTHER; note = 2-fluororibose cytosine
  modified_base 9..10: mod_base = OTHER; note = S-phosphorothioate
  modified_base 10: mod_base = OTHER; note = 2-fluororibose uracil
  modified_base 10..11: mod_base = OTHER; note = S-phosphorothioate
  modified_base 11: mod_base = OTHER; note = 2-fluororibose uracil
  modified_base 11..12: mod_base = OTHER; note R-N-(1,3-dimethylimidazolidin-2-ylidene)phosphoramidate
  modified_base 12: mod_base = OTHER; note = 2-fluororibose cytosine
  modified_base 12..13: mod_base = OTHER; note = S-phosphorothioate
  modified_base 13: mod_base = OTHER; note = 2-fluororibose adenine
  modified_base 14: mod_base = OTHER; note = 2-fluororibose guanine
  modified_base 14..15: mod_base = OTHER; note R-N-(1,3-dimethylimidazolidin-2-ylidene)phosphoramidate
  modified_base 15: mod_base = OTHER; note = 2-fluororibose uracil
  modified_base 16: mod_base = cm
  modified_base 17: mod_base = cm
  modified_base 17..18: mod_base = OTHER; note = S-phosphorothioate
  modified_base 18: mod_base = OTHER; note = 2-fluororibose cytosine
  modified_base 18..19: mod_base = OTHER; note = S-phosphorothioate
  modified_base 19: mod_base = OTHER; note = 2-fluororibose uracil
  modified_base 19..20: mod_base = OTHER; note = S-phosphorothioate
  modified_base 20: mod_base = um
  modified_base 21: mod_base = um
  modified_base 21..22: mod_base = OTHER; note = S-phosphorothioate
  modified_base 22: mod_base = OTHER; note = 2-fluororibose cytosine
  modified_base 22..23: mod_base = OTHER; note = S-phosphorothioate
  modified_base 23: mod_base = OTHER; note = deoxyribose thymine
  modified_base 23..24: mod_base = OTHER; note = S-phosphorothioate
  modified_base 24: mod_base = OTHER; note = deoxyribose uracil (position 3 connectivity)
  modified_base 24..25: mod_base = OTHER; note = S-phosphorothioate
  modified_base 25: mod_base = OTHER; note = deoxyribose inosine
  modified_base 25..26: mod_base = OTHER; note S-N-(1,3-dimethylimidazolidin-2-ylidene)phosphoramidate
  modified_base 26: mod_base = um
  modified_base 27: mod_base = OTHER; note = 2-fluororibose cytosine
  modified_base 27..28: mod_base = OTHER; note = S-phosphorothioate
  modified_base 28: mod_base = gm
  modified_base 28..29: mod_base = OTHER; note = S-phosphorothioate
  modified_base 29: mod_base = OTHER; note = 2-O-methylribose adenine
  modified_base 29..30: mod_base = OTHER; note R-N-(1,3-dimethylimidazolidin-2-ylidene)phosphoramidate
  modified_base 30: mod_base = um
  source 1..30: mol_type = other RNA

SEQ ID NO: 751 - RNA, 30 nt, synthetic construct; identical to SEQ ID NO: 273
  misc_feature 1..30: note = Synthetic: WV-44508
  misc_feature 1..30: note = Synthetic: ADR-0104259
  modified_base 1: mod_base = cm
  modified_base 1..2: mod_base = OTHER; note R-N-(1,3-dimethylimidazolidin-2-ylidene)phosphoramidate
  modified_base 2: mod_base = cm
  modified_base 2..3: mod_base = OTHER; note = S-phosphorothioate
  modified_base 3: mod_base = cm
  modified_base 3..4: mod_base = OTHER; note = S-phosphorothioate
  modified_base 4: mod_base = OTHER; note = 2-fluororibose adenine
  modified_base 4..5: mod_base = OTHER; note = S-phosphorothioate
  modified_base 5: mod_base = OTHER; note = 2-fluororibose guanine
  modified_base 5..6: mod_base = OTHER; note = S-phosphorothioate
  modified_base 6: mod_base = cm
  modified_base 7: mod_base = OTHER; note = 2-O-methylribose adenine
  modified_base 8: mod_base = OTHER; note = 2-fluororibose guanine
  modified_base 8..9: mod_base = OTHER; note = S-phosphorothioate
  modified_base 9: mod_base = OTHER; note = 2-fluororibose cytosine
  modified_base 9..10: mod_base = OTHER; note = S-phosphorothioate
  modified_base 10: mod_base = OTHER; note = 2-fluororibose uracil
  modified_base 10..11: mod_base = OTHER; note = S-phosphorothioate
  modified_base 11: mod_base = OTHER; note = 2-fluororibose uracil
  modified_base 11..12: mod_base = OTHER; note R-N-(1,3-dimethylimidazolidin-2-ylidene)phosphoramidate
  modified_base 12: mod_base = OTHER; note = 2-fluororibose cytosine
  modified_base 12..13: mod_base = OTHER; note = S-phosphorothioate
  modified_base 13: mod_base = OTHER; note = 2-fluororibose adenine
  modified_base 14: mod_base = OTHER; note = 2-fluororibose guanine
  modified_base 14..15: mod_base = OTHER; note R-N-(1,3-dimethylimidazolidin-2-ylidene)phosphoramidate
  modified_base 15: mod_base = OTHER; note = 2-fluororibose uracil
  modified_base 16: mod_base = cm
  modified_base 17: mod_base = cm
  modified_base 18: mod_base = OTHER; note = 2-fluororibose cytosine
  modified_base 18..19: mod_base = OTHER; note = S-phosphorothioate
  modified_base 19: mod_base = OTHER; note = 2-fluororibose uracil
  modified_base 19..20: mod_base = OTHER; note = S-phosphorothioate
  modified_base 20: mod_base = um
  modified_base 21: mod_base = um
  modified_base 21..22: mod_base = OTHER; note = S-phosphorothioate
  modified_base 22: mod_base = OTHER; note = 2-fluororibose cytosine
  modified_base 22..23: mod_base = OTHER; note = S-phosphorothioate
  modified_base 23: mod_base = OTHER; note = deoxyribose thymine
  modified_base 23..24: mod_base = OTHER; note = S-phosphorothioate
  modified_base 24: mod_base = OTHER; note = deoxyribose uracil (position 3 connectivity)
  modified_base 24..25: mod_base = OTHER; note = S-phosphorothioate
  modified_base 25: mod_base = OTHER; note = deoxyribose inosine
  modified_base 25..26: mod_base = OTHER; note S-N-(1,3-dimethylimidazolidin-2-ylidene)phosphoramidate
  modified_base 26: mod_base = um
  modified_base 27: mod_base = OTHER; note = 2-fluororibose cytosine
  modified_base 27..28: mod_base = OTHER; note = S-phosphorothioate
  modified_base 28: mod_base = gm
  modified_base 28..29: mod_base = OTHER; note = S-phosphorothioate
  modified_base 29: mod_base = OTHER; note = 2-O-methylribose adenine
  modified_base 29..30: mod_base = OTHER; note R-N-(1,3-dimethylimidazolidin-2-ylidene)phosphoramidate
  modified_base 30: mod_base = um
  source 1..30: mol_type = other RNA

SEQ ID NO: 752 - RNA, 30 nt, synthetic construct; identical to SEQ ID NO: 273
  misc_feature 1..30: note = Synthetic: WV-44509
  misc_feature 1..30: note = Synthetic: ADR-0104274
  modified_base 1: mod_base = cm
  modified_base 1..2: mod_base = OTHER; note R-N-(1,3-dimethylimidazolidin-2-ylidene)phosphoramidate
  modified_base 2: mod_base = cm
  modified_base 2..3: mod_base = OTHER; note = S-phosphorothioate
  modified_base 3: mod_base = cm
  modified_base 3..4: mod_base = OTHER; note = S-phosphorothioate
  modified_base 4: mod_base = OTHER; note = 2-fluororibose adenine
  modified_base 4..5: mod_base = OTHER; note = S-phosphorothioate
  modified_base 5: mod_base = OTHER; note = 2-fluororibose guanine
  modified_base 5..6: mod_base = OTHER; note = S-phosphorothioate
  modified_base 6: mod_base = cm
  modified_base 7: mod_base = OTHER; note = 2-O-methylribose adenine
  modified_base 8: mod_base = OTHER; note = 2-fluororibose guanine
  modified_base 8..9: mod_base = OTHER; note = S-phosphorothioate
  modified_base 9: mod_base = OTHER; note = 2-fluororibose cytosine
  modified_base 9..10: mod_base = OTHER; note = S-phosphorothioate
  modified_base 10: mod_base = um
  modified_base 11: mod_base = um
  modified_base 11..12: mod_base = OTHER; note R-N-(1,3-dimethylimidazolidin-2-ylidene)phosphoramidate
  modified_base 12: mod_base = OTHER; note = 2-fluororibose cytosine
  modified_base 12..13: mod_base = OTHER; note = S-phosphorothioate
  modified_base 13: mod_base = OTHER; note = 2-fluororibose adenine
  modified_base 14: mod_base = OTHER; note = 2-fluororibose guanine
  modified_base 14..15: mod_base = OTHER; note R-N-(1,3-dimethylimidazolidin-2-ylidene)phosphoramidate
  modified_base 15: mod_base = OTHER; note = 2-fluororibose uracil
  modified_base 15..16: mod_base = OTHER; note = S-phosphorothioate
  modified_base 16: mod_base = cm
  modified_base 17: mod_base = cm
  modified_base 18: mod_base = OTHER; note = 2-fluororibose cytosine
  modified_base 18..19: mod_base = OTHER; note = S-phosphorothioate
  modified_base 19: mod_base = OTHER; note = 2-fluororibose uracil
  modified_base 19..20: mod_base = OTHER; note = S-phosphorothioate
  modified_base 20: mod_base = um
  modified_base 21: mod_base = um
  modified_base 21..22: mod_base = OTHER; note = S-phosphorothioate
  modified_base 22: mod_base = OTHER; note = 2-fluororibose cytosine
  modified_base 22..23: mod_base = OTHER; note = S-phosphorothioate
  modified_base 23: mod_base = OTHER; note = deoxyribose thymine
  modified_base 23..24: mod_base = OTHER; note = S-phosphorothioate
  modified_base 24: mod_base = OTHER; note = deoxyribose uracil (position 3 connectivity)
  modified_base 24..25: mod_base = OTHER; note = S-phosphorothioate
  modified_base 25: mod_base = OTHER; note = deoxyribose inosine
  modified_base 25..26: mod_base = OTHER; note S-N-(1,3-dimethylimidazolidin-2-ylidene)phosphoramidate
  modified_base 26: mod_base = um
  modified_base 27: mod_base = OTHER; note = 2-fluororibose cytosine
  modified_base 27..28: mod_base = OTHER; note = S-phosphorothioate
  modified_base 28: mod_base = gm
  modified_base 28..29: mod_base = OTHER; note = S-phosphorothioate
  modified_base 29: mod_base = OTHER; note = 2-O-methylribose adenine
  modified_base 29..30: mod_base = OTHER; note R-N-(1,3-dimethylimidazolidin-2-ylidene)phosphoramidate
  modified_base 30: mod_base = um
  source 1..30: mol_type = other RNA

SEQ ID NO: 753 - RNA, 30 nt, synthetic construct; identical to SEQ ID NO: 273
  misc_feature 1..30: note = Synthetic: WV-44510
  misc_feature 1..30: note = Synthetic: ADR-0104115
  modified_base 1: mod_base = cm
  modified_base 1..2: mod_base = OTHER; note R-N-(1,3-dimethylimidazolidin-2-ylidene)phosphoramidate
  modified_base 2: mod_base = cm
  modified_base 2..3: mod_base = OTHER; note = S-phosphorothioate
  modified_base 3: mod_base = cm
  modified_base 3..4: mod_base = OTHER; note = S-phosphorothioate
  modified_base 4: mod_base = OTHER; note = 2-fluororibose adenine
  modified_base 4..5: mod_base = OTHER; note = S-phosphorothioate
  modified_base 5: mod_base = OTHER; note = 2-fluororibose guanine
  modified_base 5..6: mod_base = OTHER; note = S-phosphorothioate
  modified_base 6: mod_base = cm
  modified_base 7: mod_base = OTHER; note = 2-fluororibose adenine
  modified_base 7..8: mod_base = OTHER; note = S-phosphorothioate
  modified_base 8: mod_base = OTHER; note = 2-fluororibose guanine
  modified_base 8..9: mod_base = OTHER; note = S-phosphorothioate
  modified_base 9: mod_base = cm
  modified_base 10: mod_base = um
  modified_base 11: mod_base = OTHER; note = 2-fluororibose uracil
  modified_base 11..12: mod_base = OTHER; note R-N-(1,3-dimethylimidazolidin-2-ylidene)phosphoramidate
  modified_base 12: mod_base = cm
  modified_base 13: mod_base = OTHER; note = 2-fluororibose adenine
  modified_base 14: mod_base = OTHER; note = 2-fluororibose guanine
  modified_base 14..15: mod_base = OTHER; note R-N-(1,3-dimethylimidazolidin-2-ylidene)phosphoramidate
  modified_base 15: mod_base = um
  modified_base 16: mod_base = cm
  modified_base 17: mod_base = OTHER; note = 2-fluororibose cytosine
  modified_base 17..18: mod_base = OTHER; note = S-phosphorothioate
  modified_base 18: mod_base = OTHER; note = 2-fluororibose cytosine
  modified_base 18..19: mod_base = OTHER; note = S-phosphorothioate
  modified_base 19: mod_base = um
  modified_base 20: mod_base = um
  modified_base 21: mod_base = OTHER; note = 2-fluororibose uracil
  modified_base 21..22: mod_base = OTHER; note = S-phosphorothioate
  modified_base 22: mod_base = OTHER; note = 2-fluororibose cytosine
  modified_base 22..23: mod_base = OTHER; note = S-phosphorothioate
  modified_base 23: mod_base = OTHER; note = deoxyribose thymine
  modified_base 23..24: mod_base = OTHER; note = S-phosphorothioate
  modified_base 24: mod_base = OTHER; note = deoxyribose uracil (position 3 connectivity)
  modified_base 24..25: mod_base = OTHER; note = S-phosphorothioate
  modified_base 25: mod_base = OTHER; note = deoxyribose inosine
  modified_base 25..26: mod_base = OTHER; note S-N-(1,3-dimethylimidazolidin-2-ylidene)phosphoramidate
  modified_base 26: mod_base = um
  modified_base 27: mod_base = OTHER; note = 2-fluororibose cytosine
  modified_base 27..28: mod_base = OTHER; note = S-phosphorothioate
  modified_base 28: mod_base = gm
  modified_base 28..29: mod_base = OTHER; note = S-phosphorothioate
  modified_base 29: mod_base = OTHER; note = 2-O-methylribose adenine
  modified_base 29..30: mod_base = OTHER; note R-N-(1,3-dimethylimidazolidin-2-ylidene)phosphoramidate
  modified_base 30: mod_base = um
  source 1..30: mol_type = other RNA

SEQ ID NO: 754 - RNA, 30 nt, synthetic construct; identical to SEQ ID NO: 273
  misc_feature 1..30: note = Synthetic: WV-44511
  misc_feature 1..30: note = Synthetic: ADR-0104261
  modified_base 1: mod_base = cm
  modified_base 1..2: mod_base = OTHER; note R-N-(1,3-dimethylimidazolidin-2-ylidene)phosphoramidate
  modified_base 2: mod_base = cm
  modified_base 2..3: mod_base = OTHER; note = S-phosphorothioate
  modified_base 3: mod_base = cm
  modified_base 3..4: mod_base = OTHER; note = S-phosphorothioate
  modified_base 4: mod_base = OTHER; note = 2-fluororibose adenine
  modified_base 4..5: mod_base = OTHER; note = S-phosphorothioate
  modified_base 5: mod_base = OTHER; note = 2-fluororibose guanine
  modified_base 5..6: mod_base = OTHER; note = S-phosphorothioate
  modified_base 6: mod_base = cm
  modified_base 7: mod_base = OTHER; note = 2-O-methylribose adenine
  modified_base 8: mod_base = OTHER; note = 2-fluororibose guanine
  modified_base 8..9: mod_base = OTHER; note = S-phosphorothioate
  modified_base 9: mod_base = OTHER; note = 2-fluororibose cytosine
  modified_base 9..10: mod_base = OTHER; note = S-phosphorothioate
  modified_base 10: mod_base = um
  modified_base 10..11: mod_base = OTHER; note = S-phosphorothioate
  modified_base 11: mod_base = um
  modified_base 11..12: mod_base = OTHER; note R-N-(1,3-dimethylimidazolidin-2-ylidene)phosphoramidate
  modified_base 12: mod_base = OTHER; note = 2-fluororibose cytosine
  modified_base 12..13: mod_base = OTHER; note = S-phosphorothioate
  modified_base 13: mod_base = OTHER; note = 2-fluororibose adenine
  modified_base 14: mod_base = gm
  modified_base 14..15: mod_base = OTHER; note R-N-(1,3-dimethylimidazolidin-2-ylidene)phosphoramidate
  modified_base 15: mod_base = um
  modified_base 16: mod_base = OTHER; note = 2-fluororibose cytosine
  modified_base 16..17: mod_base = OTHER; note = S-phosphorothioate
  modified_base 17: mod_base = OTHER; note = 2-fluororibose cytosine
  modified_base 17..18: mod_base = OTHER; note = S-phosphorothioate
  modified_base 18: mod_base = cm
  modified_base 19: mod_base = um
  modified_base 20: mod_base = um
  modified_base 21: mod_base = OTHER; note = 2-fluororibose uracil
  modified_base 21..22: mod_base = OTHER; note = S-phosphorothioate
  modified_base 22: mod_base = OTHER; note = 2-fluororibose cytosine
  modified_base 22..23: mod_base = OTHER; note = S-phosphorothioate
  modified_base 23: mod_base = OTHER; note = deoxyribose thymine
  modified_base 23..24: mod_base = OTHER; note = S-phosphorothioate
  modified_base 24: mod_base = OTHER; note = deoxyribose uracil (position 3 connectivity)
  modified_base 24..25: mod_base = OTHER; note = S-phosphorothioate
  modified_base 25: mod_base = OTHER; note = deoxyribose inosine
  modified_base 25..26: mod_base = OTHER; note S-N-(1,3-dimethylimidazolidin-2-ylidene)phosphoramidate
  modified_base 26: mod_base = um
  modified_base 27: mod_base = OTHER; note = 2-fluororibose cytosine
  modified_base 27..28: mod_base = OTHER; note = S-phosphorothioate
  modified_base 28: mod_base = gm
  modified_base 28..29: mod_base = OTHER; note = S-phosphorothioate
  modified_base 29: mod_base = OTHER; note = 2-O-methylribose adenine
  modified_base 29..30: mod_base = OTHER; note R-N-(1,3-dimethylimidazolidin-2-ylidene)phosphoramidate
  modified_base 30: mod_base = um
  source 1..30: mol_type = other RNA

SEQ ID NO: 755 - RNA, 30 nt, synthetic construct; identical to SEQ ID NO: 273
  misc_feature 1..30: note = Synthetic: WV-44512
  misc_feature 1..30: note = Synthetic: ADR-0104302
  modified_base 1: mod_base = cm
  modified_base 1..2: mod_base = OTHER; note R-N-(1,3-dimethylimidazolidin-2-ylidene)phosphoramidate
  modified_base 2: mod_base = cm
  modified_base 2..3: mod_base = OTHER; note = S-phosphorothioate
  modified_base 3: mod_base = cm
  modified_base 3..4: mod_base = OTHER; note = S-phosphorothioate
  modified_base 4: mod_base = OTHER; note = 2-fluororibose adenine
  modified_base 4..5: mod_base = OTHER; note = S-phosphorothioate
  modified_base 5: mod_base = OTHER; note = 2-fluororibose guanine
  modified_base 5..6: mod_base = OTHER; note = S-phosphorothioate
  modified_base 6: mod_base = cm
  modified_base 7: mod_base = OTHER; note = 2-O-methylribose adenine
  modified_base 8: mod_base = gm
  modified_base 9: mod_base = OTHER; note = 2-fluororibose cytosine
  modified_base 9..10: mod_base = OTHER; note = S-phosphorothioate
  modified_base 10: mod_base = OTHER; note = 2-fluororibose uracil
  modified_base 10..11: mod_base = OTHER; note = S-phosphorothioate
  modified_base 11: mod_base = OTHER; note = 2-fluororibose uracil
  modified_base 11..12: mod_base = OTHER; note R-N-(1,3-dimethylimidazolidin-2-ylidene)phosphoramidate
  modified_base 12: mod_base = OTHER; note = 2-fluororibose cytosine
  modified_base 12..13: mod_base = OTHER; note = S-phosphorothioate
  modified_base 13: mod_base = OTHER; note = 2-fluororibose adenine
  modified_base 14: mod_base = OTHER; note = 2-fluororibose guanine
  modified_base 14..15: mod_base = OTHER; note R-N-(1,3-dimethylimidazolidin-2-ylidene)phosphoramidate
  modified_base 15: mod_base = OTHER; note = 2-fluororibose uracil
  modified_base 16: mod_base = cm
  modified_base 17: mod_base = cm
  modified_base 18: mod_base = OTHER; note = 2-fluororibose cytosine
  modified_base 18..19: mod_base = OTHER; note = S-phosphorothioate
  modified_base 19: mod_base = OTHER; note = 2-fluororibose uracil
  modified_base 19..20: mod_base = OTHER; note = S-phosphorothioate
  modified_base 20: mod_base = um
  modified_base 21: mod_base = um
  modified_base 21..22: mod_base = OTHER; note = S-phosphorothioate
  modified_base 22: mod_base = OTHER; note = 2-fluororibose cytosine
  modified_base 22..23: mod_base = OTHER; note = S-phosphorothioate
  modified_base 23: mod_base = OTHER; note = deoxyribose thymine
  modified_base 23..24: mod_base = OTHER; note = S-phosphorothioate
  modified_base 24: mod_base = OTHER; note = deoxyribose uracil (position 3 connectivity)
  modified_base 24..25: mod_base = OTHER; note = S-phosphorothioate
  modified_base 25: mod_base = OTHER; note = deoxyribose inosine
  modified_base 25..26: mod_base = OTHER; note S-N-(1,3-dimethylimidazolidin-2-ylidene)phosphoramidate
  modified_base 26: mod_base = um
  modified_base 27: mod_base = OTHER; note = 2-fluororibose cytosine
  modified_base 27..28: mod_base = OTHER; note = S-phosphorothioate
  modified_base 28: mod_base = gm
  modified_base 28..29: mod_base = OTHER; note = S-phosphorothioate
  modified_base 29: mod_base = OTHER; note = 2-O-methylribose adenine
  modified_base 29..30: mod_base = OTHER; note R-N-(1,3-dimethylimidazolidin-2-ylidene)phosphoramidate
  modified_base 30: mod_base = um
  source 1..30: mol_type = other RNA

SEQ ID NO: 756 - RNA, 30 nt, synthetic construct; identical to SEQ ID NO: 273
  misc_feature 1..30: note = Synthetic: WV-44513
  misc_feature 1..30: note = Synthetic: ADR-0104257
  modified_base 1: mod_base = cm
  modified_base 1..2: mod_base = OTHER; note R-N-(1,3-dimethylimidazolidin-2-ylidene)phosphoramidate
  modified_base 2: mod_base = cm
  modified_base 2..3: mod_base = OTHER; note = S-phosphorothioate
  modified_base 3: mod_base = cm
  modified_base 3..4: mod_base = OTHER; note = S-phosphorothioate
  modified_base 4: mod_base = OTHER; note = 2-fluororibose adenine
  modified_base 4..5: mod_base = OTHER; note = S-phosphorothioate
  modified_base 5: mod_base = OTHER; note = 2-fluororibose guanine
  modified_base 5..6: mod_base = OTHER; note = S-phosphorothioate
  modified_base 6: mod_base = cm
  modified_base 7: mod_base = OTHER; note = 2-O-methylribose adenine
  modified_base 8: mod_base = OTHER; note = 2-fluororibose guanine
  modified_base 8..9: mod_base = OTHER; note = S-phosphorothioate
  modified_base 9: mod_base = OTHER; note = 2-fluororibose cytosine
  modified_base 9..10: mod_base = OTHER; note = S-phosphorothioate
  modified_base 10: mod_base = OTHER; note = 2-fluororibose uracil
  modified_base 10..11: mod_base = OTHER; note = S-phosphorothioate
  modified_base 11: mod_base = OTHER; note = 2-fluororibose uracil
  modified_base 11..12: mod_base = OTHER; note R-N-(1,3-dimethylimidazolidin-2-ylidene)phosphoramidate
  modified_base 12: mod_base = OTHER; note = 2-fluororibose cytosine
  modified_base 12..13: mod_base = OTHER; note = S-phosphorothioate
  modified_base 13: mod_base = OTHER; note = 2-fluororibose adenine
  modified_base 14: mod_base = OTHER; note = 2-fluororibose guanine
  modified_base 14..15: mod_base = OTHER; note R-N-(1,3-dimethylimidazolidin-2-ylidene)phosphoramidate
  modified_base 15: mod_base = OTHER; note = 2-fluororibose uracil
  modified_base 15..16: mod_base = OTHER; note = S-phosphorothioate
  modified_base 16: mod_base = OTHER; note = 2-fluororibose cytosine
  modified_base 17: mod_base = cm
  modified_base 18: mod_base = cm
  modified_base 19: mod_base = um
  modified_base 20: mod_base = um
  modified_base 21: mod_base = OTHER; note = 2-fluororibose uracil
  modified_base 21..22: mod_base = OTHER; note = S-phosphorothioate
  modified_base 22: mod_base = OTHER; note = 2-fluororibose cytosine
  modified_base 22..23: mod_base = OTHER; note = S-phosphorothioate
  modified_base 23: mod_base = OTHER; note = deoxyribose thymine
  modified_base 23..24: mod_base = OTHER; note = S-phosphorothioate
  modified_base 24: mod_base = OTHER; note = deoxyribose uracil (position 3 connectivity)
  modified_base 24..25: mod_base = OTHER; note = S-phosphorothioate
  modified_base 25: mod_base = OTHER; note = deoxyribose inosine
  modified_base 25..26: mod_base = OTHER; note S-N-(1,3-dimethylimidazolidin-2-ylidene)phosphoramidate
  modified_base 26: mod_base = um
  modified_base 27: mod_base = OTHER; note = 2-fluororibose cytosine
  modified_base 27..28: mod_base = OTHER; note = S-phosphorothioate
  modified_base 28: mod_base = gm
  modified_base 28..29: mod_base = OTHER; note = S-phosphorothioate
  modified_base 29: mod_base = OTHER; note = 2-O-methylribose adenine
  modified_base 29..30: mod_base = OTHER; note R-N-(1,3-dimethylimidazolidin-2-ylidene)phosphoramidate
  modified_base 30: mod_base = um
  source 1..30: mol_type = other RNA

SEQ ID NO: 757 - RNA, 30 nt, synthetic construct; identical to SEQ ID NO: 273
  misc_feature 1..30: note = Synthetic: WV-44514
  misc_feature 1..30: note = Synthetic: ADR-0104056
  modified_base 1: mod_base = cm
  modified_base 1..2: mod_base = OTHER; note R-N-(1,3-dimethylimidazolidin-2-ylidene)phosphoramidate
  modified_base 2: mod_base = cm
  modified_base 2..3: mod_base = OTHER; note = S-phosphorothioate
  modified_base 3: mod_base = cm
  modified_base 3..4: mod_base = OTHER; note = S-phosphorothioate
  modified_base 4: mod_base = OTHER; note = 2-fluororibose adenine
  modified_base 4..5: mod_base = OTHER; note = S-phosphorothioate
  modified_base 5: mod_base = OTHER; note = 2-fluororibose guanine
  modified_base 5..6: mod_base = OTHER; note = S-phosphorothioate
  modified_base 6: mod_base = OTHER; note = 2-fluororibose cytosine
  modified_base 7: mod_base = OTHER; note = 2-O-methylribose adenine
  modified_base 7..8: mod_base = OTHER; note = S-phosphorothioate
  modified_base 8: mod_base = OTHER; note = 2-fluororibose guanine
  modified_base 8..9: mod_base = OTHER; note = S-phosphorothioate
  modified_base 9: mod_base = OTHER; note = 2-fluororibose cytosine
  modified_base 10: mod_base = um
  modified_base 10..11: mod_base = OTHER; note = S-phosphorothioate
  modified_base 11: mod_base = OTHER; note = 2-fluororibose uracil
  modified_base 11..12: mod_base = OTHER; note R-N-(1,3-dimethylimidazolidin-2-ylidene)phosphoramidate
  modified_base 12: mod_base = cm
  modified_base 13: mod_base = OTHER; note = 2-fluororibose adenine
  modified_base 13..14: mod_base = OTHER; note = S-phosphorothioate
  modified_base 14: mod_base = OTHER; note = 2-fluororibose guanine
  modified_base 14..15: mod_base = OTHER; note R-N-(1,3-dimethylimidazolidin-2-ylidene)phosphoramidate
  modified_base 15: mod_base = OTHER; note = 2-fluororibose uracil
  modified_base 16: mod_base = cm
  modified_base 16..17: mod_base = OTHER; note = S-phosphorothioate
  modified_base 17: mod_base = OTHER; note = 2-fluororibose cytosine
  modified_base 17..18: mod_base = OTHER; note = S-phosphorothioate
  modified_base 18: mod_base = OTHER; note = 2-fluororibose cytosine
  modified_base 18..19: mod_base = OTHER; note = S-phosphorothioate
  modified_base 19: mod_base = OTHER; note = 2-fluororibose uracil
  modified_base 19..20: mod_base = OTHER; note = S-phosphorothioate
  modified_base 20: mod_base = OTHER; note = 2-fluororibose uracil
  modified_base 20..21: mod_base = OTHER; note = S-phosphorothioate
  modified_base 21: mod_base = um
  modified_base 22: mod_base = OTHER; note = 2-fluororibose cytosine
  modified_base 22..23: mod_base = OTHER; note = S-phosphorothioate
  modified_base 23: mod_base = OTHER; note = deoxyribose thymine
  modified_base 23..24: mod_base = OTHER; note = S-phosphorothioate
  modified_base 24: mod_base = OTHER; note = deoxyribose uracil (position 3 connectivity)
  modified_base 24..25: mod_base = OTHER; note = S-phosphorothioate
  modified_base 25: mod_base = OTHER; note = deoxyribose inosine
  modified_base 25..26: mod_base = OTHER; note S-N-(1,3-dimethylimidazolidin-2-ylidene)phosphoramidate
  modified_base 26: mod_base = um
  modified_base 27: mod_base = OTHER; note = 2-fluororibose cytosine
  modified_base 27..28: mod_base = OTHER; note = S-phosphorothioate
  modified_base 28: mod_base = gm
  modified_base 28..29: mod_base = OTHER; note = S-phosphorothioate
  modified_base 29: mod_base = OTHER; note = 2-O-methylribose adenine
  modified_base 29..30: mod_base = OTHER; note R-N-(1,3-dimethylimidazolidin-2-ylidene)phosphoramidate
  modified_base 30: mod_base = um
  source 1..30: mol_type = other RNA

SEQ ID NO: 758 - RNA, 30 nt, synthetic construct; identical to SEQ ID NO: 273
  misc_feature 1..30: note = Synthetic: WV-46416
  misc_feature 1..30: note = Synthetic: ADR-0104297
  modified_base 1: mod_base = cm
  modified_base 1..2: mod_base = OTHER; note R-N-(1,3-dimethylimidazolidin-2-ylidene)phosphoramidate
  modified_base 2: mod_base = cm
  modified_base 2..3: mod_base = OTHER; note = S-phosphorothioate
  modified_base 3: mod_base = cm
  modified_base 3..4: mod_base = OTHER; note = S-phosphorothioate
  modified_base 4: mod_base = OTHER; note = 2-fluororibose adenine
  modified_base 4..5: mod_base = OTHER; note = S-phosphorothioate
  modified_base 5: mod_base = OTHER; note = 2-fluororibose guanine
  modified_base 5..6: mod_base = OTHER; note = S-phosphorothioate
  modified_base 6: mod_base = cm
  modified_base 7: mod_base = OTHER; note = 2-O-methylribose adenine
  modified_base 8: mod_base = OTHER; note = 2-fluororibose guanine
  modified_base 8..9: mod_base = OTHER; note = S-phosphorothioate
  modified_base 9: mod_base = cm
  modified_base 10: mod_base = um
  modified_base 10..11: mod_base = OTHER; note = S-phosphorothioate
  modified_base 11: mod_base = um
  modified_base 11..12: mod_base = OTHER; note R-N-(1,3-dimethylimidazolidin-2-ylidene)phosphoramidate
  modified_base 12: mod_base = cm
  modified_base 13: mod_base = OTHER; note = 2-O-methylribose adenine
  modified_base 13..14: mod_base = OTHER; note = S-phosphorothioate
  modified_base 14: mod_base = gm
  modified_base 14..15: mod_base = OTHER; note R-N-(1,3-dimethylimidazolidin-2-ylidene)phosphoramidate
  modified_base 15: mod_base = um
  modified_base 16: mod_base = cm
  modified_base 17: mod_base = cm
  modified_base 17..18: mod_base = OTHER; note = S-phosphorothioate
  modified_base 18: mod_base = cm
  modified_base 18..19: mod_base = OTHER; note = S-phosphorothioate
  modified_base 19: mod_base = um
  modified_base 19..20: mod_base = OTHER; note = S-phosphorothioate
  modified_base 20: mod_base = um
  modified_base 21: mod_base = um
  modified_base 22: mod_base = cm
  modified_base 22..23: mod_base = OTHER; note = S-phosphorothioate
  modified_base 23: mod_base = OTHER; note = deoxyribose thymine
  modified_base 23..24: mod_base = OTHER; note = S-phosphorothioate
  modified_base 24: mod_base = OTHER; note = deoxyribose uracil (position 3 connectivity)
  modified_base 24..25: mod_base = OTHER; note = S-phosphorothioate
  modified_base 25: mod_base = OTHER; note = deoxyribose inosine
  modified_base 25..26: mod_base = OTHER; note S-N-(1,3-dimethylimidazolidin-2-ylidene)phosphoramidate
  modified_base 26: mod_base = um
  modified_base 27: mod_base = OTHER; note = 2-fluororibose cytosine
  modified_base 27..28: mod_base = OTHER; note = S-phosphorothioate
  modified_base 28: mod_base = gm
  modified_base 28..29: mod_base = OTHER; note = S-phosphorothioate
  modified_base 29: mod_base = OTHER; note = 2-O-methylribose adenine
  modified_base 29..30: mod_base = OTHER; note R-N-(1,3-dimethylimidazolidin-2-ylidene)phosphoramidate
  modified_base 30: mod_base = um
  source 1..30: mol_type = other RNA

SEQ ID NO: 759 - RNA, 30 nt, synthetic construct; identical to SEQ ID NO: 273
  misc_feature 1..30: note = Synthetic: WV-46417
  misc_feature 1..30: note = Synthetic: ADR-0104077
  modified_base 1: mod_base = cm
  modified_base 1..2: mod_base = OTHER; note R-N-(1,3-dimethylimidazolidin-2-ylidene)phosphoramidate
  modified_base 2: mod_base = cm
  modified_base 2..3: mod_base = OTHER; note = S-phosphorothioate
  modified_base 3: mod_base = cm
  modified_base 3..4: mod_base = OTHER; note = S-phosphorothioate
  modified_base 4: mod_base = OTHER; note = 2-fluororibose adenine
  modified_base 4..5: mod_base = OTHER; note = S-phosphorothioate
  modified_base 5: mod_base = OTHER; note = 2-fluororibose guanine
  modified_base 5..6: mod_base = OTHER; note = S-phosphorothioate
  modified_base 6: mod_base = OTHER; note = 2-fluororibose cytosine
  modified_base 7: mod_base = OTHER; note = 2-O-methylribose adenine
  modified_base 7..8: mod_base = OTHER; note = S-phosphorothioate
  modified_base 8: mod_base = OTHER; note = 2-fluororibose guanine
  modified_base 8..9: mod_base = OTHER; note = S-phosphorothioate
  modified_base 9: mod_base = cm
  modified_base 10: mod_base = um
  modified_base 10..11: mod_base = OTHER; note = S-phosphorothioate
  modified_base 11: mod_base = um
  modified_base 11..12: mod_base = OTHER; note R-N-(1,3-dimethylimidazolidin-2-ylidene)phosphoramidate
  modified_base 12: mod_base = cm
  modified_base 13: mod_base = OTHER; note = 2-fluororibose adenine
  modified_base 13..14: mod_base = OTHER; note = S-phosphorothioate
  modified_base 14: mod_base = OTHER; note = 2-fluororibose guanine
  modified_base 14..15: mod_base = OTHER; note R-N-(1,3-dimethylimidazolidin-2-ylidene)phosphoramidate
  modified_base 15: mod_base = um
  modified_base 16: mod_base = cm
  modified_base 16..17: mod_base = OTHER; note = S-phosphorothioate
  modified_base 17: mod_base = OTHER; note = 2-fluororibose cytosine
  modified_base 17..18: mod_base = OTHER; note = S-phosphorothioate
  modified_base 18: mod_base = OTHER; note = 2-fluororibose cytosine
  modified_base 18..19: mod_base = OTHER; note = S-phosphorothioate
  modified_base 19: mod_base = OTHER; note = 2-fluororibose uracil
  modified_base 19..20: mod_base = OTHER; note R-N-(1,3-dimethylimidazolidin-2-ylidene)phosphoramidate
  modified_base 20: mod_base = OTHER; note = 2-fluororibose uracil
  modified_base 20..21: mod_base = OTHER; note = S-phosphorothioate
  modified_base 21: mod_base = um
  modified_base 22: mod_base = OTHER; note = 2-fluororibose cytosine
  modified_base 22..23: mod_base = OTHER; note = S-phosphorothioate
  modified_base 23: mod_base = OTHER; note = deoxyribose thymine
  modified_base 23..24: mod_base = OTHER; note = S-phosphorothioate
  modified_base 24: mod_base = OTHER; note = deoxyribose uracil (position 3 connectivity)
  modified_base 24..25: mod_base = OTHER; note = S-phosphorothioate
  modified_base 25: mod_base = OTHER; note = deoxyribose inosine
  modified_base 25..26: mod_base = OTHER; note S-N-(1,3-dimethylimidazolidin-2-ylidene)phosphoramidate
  modified_base 26: mod_base = um
  modified_base 27: mod_base = OTHER; note = 2-fluororibose cytosine
  modified_base 27..28: mod_base = OTHER; note = S-phosphorothioate
  modified_base 28: mod_base = gm
  modified_base 28..29: mod_base = OTHER; note = S-phosphorothioate
  modified_base 29: mod_base = OTHER; note = 2-O-methylribose adenine
  modified_base 29..30: mod_base = OTHER; note R-N-(1,3-dimethylimidazolidin-2-ylidene)phosphoramidate
  modified_base 30: mod_base = um
  source 1..30: mol_type = other RNA

SEQ ID NO: 760 - RNA, 30 nt, synthetic construct; identical to SEQ ID NO: 273
  misc_feature 1..30: note = Synthetic: WV-46418
  misc_feature 1..30: note = Synthetic: ADR-0104075
  modified_base 1: mod_base = cm
  modified_base 1..2: mod_base = OTHER; note R-N-(1,3-dimethylimidazolidin-2-ylidene)phosphoramidate
  modified_base 2: mod_base = cm
  modified_base 2..3: mod_base = OTHER; note = S-phosphorothioate
  modified_base 3: mod_base = cm
  modified_base 3..4: mod_base = OTHER; note = S-phosphorothioate
  modified_base 4: mod_base = OTHER; note = 2-fluororibose adenine
  modified_base 4..5: mod_base = OTHER; note = S-phosphorothioate
  modified_base 5: mod_base = OTHER; note = 2-fluororibose guanine
  modified_base 5..6: mod_base = OTHER; note = S-phosphorothioate
  modified_base 6: mod_base = OTHER; note = 2-fluororibose cytosine
  modified_base 7: mod_base = OTHER; note = 2-O-methylribose adenine
  modified_base 7..8: mod_base = OTHER; note = S-phosphorothioate
  modified_base 8: mod_base = OTHER; note = 2-fluororibose guanine
  modified_base 8..9: mod_base = OTHER; note = S-phosphorothioate
  modified_base 9: mod_base = cm
  modified_base 10: mod_base = um
  modified_base 10..11: mod_base = OTHER; note = S-phosphorothioate
  modified_base 11: mod_base = um
  modified_base 11..12: mod_base = OTHER; note R-N-(1,3-dimethylimidazolidin-2-ylidene)phosphoramidate
  modified_base 12: mod_base = cm
  modified_base 13: mod_base = OTHER; note = 2-fluororibose adenine
  modified_base 13..14: mod_base = OTHER; note = S-phosphorothioate
  modified_base 14: mod_base = OTHER; note = 2-fluororibose guanine
  modified_base 14..15: mod_base = OTHER; note R-N-(1,3-dimethylimidazolidin-2-ylidene)phosphoramidate
  modified_base 15: mod_base = OTHER; note = 2-fluororibose uracil
  modified_base 16: mod_base = cm
  modified_base 16..17: mod_base = OTHER; note = S-phosphorothioate
  modified_base 17: mod_base = OTHER; note = 2-fluororibose cytosine
  modified_base 17..18: mod_base = OTHER; note = S-phosphorothioate
  modified_base 18: mod_base = OTHER; note = 2-fluororibose cytosine
  modified_base 18..19: mod_base = OTHER; note = S-phosphorothioate
  modified_base 19: mod_base = OTHER; note = 2-fluororibose uracil
  modified_base 19..20: mod_base = OTHER; note R-N-(1,3-dimethylimidazolidin-2-ylidene)phosphoramidate
  modified_base 20: mod_base = um
  modified_base 21: mod_base = um
  modified_base 22: mod_base = OTHER; note = 2-fluororibose cytosine
  modified_base 22..23: mod_base = OTHER; note = S-phosphorothioate
  modified_base 23: mod_base = OTHER; note = deoxyribose thymine
  modified_base 23..24: mod_base = OTHER; note = S-phosphorothioate
  modified_base 24: mod_base = OTHER; note = deoxyribose uracil (position 3 connectivity)
  modified_base 24..25: mod_base = OTHER; note = S-phosphorothioate
  modified_base 25: mod_base = OTHER; note = deoxyribose inosine
  modified_base 25..26: mod_base = OTHER; note S-N-(1,3-dimethylimidazolidin-2-ylidene)phosphoramidate
  modified_base 26: mod_base = um
  modified_base 27: mod_base = OTHER; note = 2-fluororibose cytosine
  modified_base 27..28: mod_base = OTHER; note = S-phosphorothioate
  modified_base 28: mod_base = gm
  modified_base 28..29: mod_base = OTHER; note = S-phosphorothioate
  modified_base 29: mod_base = OTHER; note = 2-O-methylribose adenine
  modified_base 29..30: mod_base = OTHER; note R-N-(1,3-dimethylimidazolidin-2-ylidene)phosphoramidate
  modified_base 30: mod_base = um
  source 1..30: mol_type = other RNA

SEQ ID NO: 761 - RNA, 30 nt, synthetic construct; identical to SEQ ID NO: 273
  misc_feature 1..30: note = Synthetic: WV-46419
  misc_feature 1..30: note = Synthetic: ADR-0104076
  modified_base 1: mod_base = cm
  modified_base 1..2: mod_base = OTHER; note R-N-(1,3-dimethylimidazolidin-2-ylidene)phosphoramidate
  modified_base 2: mod_base = cm
  modified_base 2..3: mod_base = OTHER; note = S-phosphorothioate
  modified_base 3: mod_base = cm
  modified_base 3..4: mod_base = OTHER; note = S-phosphorothioate
  modified_base 4: mod_base = OTHER; note = 2-fluororibose adenine
  modified_base 4..5: mod_base = OTHER; note = S-phosphorothioate
  modified_base 5: mod_base = OTHER; note = 2-fluororibose guanine
  modified_base 5..6: mod_base = OTHER; note = S-phosphorothioate
  modified_base 6: mod_base = OTHER; note = 2-fluororibose cytosine
  modified_base 7: mod_base = OTHER; note = 2-O-methylribose adenine
  modified_base 7..8: mod_base = OTHER; note = S-phosphorothioate
  modified_base 8: mod_base = OTHER; note = 2-fluororibose guanine
  modified_base 8..9: mod_base = OTHER; note = S-phosphorothioate
  modified_base 9: mod_base = cm
  modified_base 10: mod_base = um
  modified_base 10..11: mod_base = OTHER; note = S-phosphorothioate
  modified_base 11: mod_base = um
  modified_base 11..12: mod_base = OTHER; note R-N-(1,3-dimethylimidazolidin-2-ylidene)phosphoramidate
  modified_base 12: mod_base = cm
  modified_base 13: mod_base = OTHER; note = 2-fluororibose adenine
  modified_base 13..14: mod_base = OTHER; note = S-phosphorothioate
  modified_base 14: mod_base = OTHER; note = 2-fluororibose guanine
  modified_base 14..15: mod_base = OTHER; note R-N-(1,3-dimethylimidazolidin-2-ylidene)phosphoramidate
  modified_base 15: mod_base = OTHER; note = 2-fluororibose uracil
  modified_base 16: mod_base = cm
  modified_base 16..17: mod_base = OTHER; note = S-phosphorothioate
  modified_base 17: mod_base = cm
  modified_base 18: mod_base = OTHER; note = 2-fluororibose cytosine
  modified_base 18..19: mod_base = OTHER; note = S-phosphorothioate
  modified_base 19: mod_base = OTHER; note = 2-fluororibose uracil
  modified_base 19..20: mod_base = OTHER; note R-N-(1,3-dimethylimidazolidin-2-ylidene)phosphoramidate
  modified_base 20: mod_base = OTHER; note = 2-fluororibose uracil
  modified_base 20..21: mod_base = OTHER; note = S-phosphorothioate
  modified_base 21: mod_base = um
  modified_base 22: mod_base = OTHER; note = 2-fluororibose cytosine
  modified_base 22..23: mod_base = OTHER; note = S-phosphorothioate
  modified_base 23: mod_base = OTHER; note = deoxyribose thymine
  modified_base 23..24: mod_base = OTHER; note = S-phosphorothioate
  modified_base 24: mod_base = OTHER; note = deoxyribose uracil (position 3 connectivity)
  modified_base 24..25: mod_base = OTHER; note = S-phosphorothioate
  modified_base 25: mod_base = OTHER; note = deoxyribose inosine
  modified_base 25..26: mod_base = OTHER; note S-N-(1,3-dimethylimidazolidin-2-ylidene)phosphoramidate
  modified_base 26: mod_base = um
  modified_base 27: mod_base = OTHER; note = 2-fluororibose cytosine
  modified_base 27..28: mod_base = OTHER; note = S-phosphorothioate
  modified_base 28: mod_base = gm
  modified_base 28..29: mod_base = OTHER; note = S-phosphorothioate
  modified_base 29: mod_base = OTHER; note = 2-O-methylribose adenine
  modified_base 29..30: mod_base = OTHER; note R-N-(1,3-dimethylimidazolidin-2-ylidene)phosphoramidate
  modified_base 30: mod_base = um
  source 1..30: mol_type = other RNA

SEQ ID NO: 762 - RNA, 30 nt, synthetic construct; identical to SEQ ID NO: 273
  misc_feature 1..30: note = Synthetic: WV-46420
  misc_feature 1..30: note = Synthetic: ADR-0104079
  modified_base 1: mod_base = cm
  modified_base 1..2: mod_base = OTHER; note R-N-(1,3-dimethylimidazolidin-2-ylidene)phosphoramidate
  modified_base 2: mod_base = cm
  modified_base 2..3: mod_base = OTHER; note = S-phosphorothioate
  modified_base 3: mod_base = cm
  modified_base 3..4: mod_base = OTHER; note = S-phosphorothioate
  modified_base 4: mod_base = OTHER; note = 2-fluororibose adenine
  modified_base 4..5: mod_base = OTHER; note = S-phosphorothioate
  modified_base 5: mod_base = OTHER; note = 2-fluororibose guanine
  modified_base 5..6: mod_base = OTHER; note = S-phosphorothioate
  modified_base 6: mod_base = OTHER; note = 2-fluororibose cytosine
  modified_base 7: mod_base = OTHER; note = 2-O-methylribose adenine
  modified_base 7..8: mod_base = OTHER; note = S-phosphorothioate
  modified_base 8: mod_base = OTHER; note = 2-fluororibose guanine
  modified_base 8..9: mod_base = OTHER; note = S-phosphorothioate
  modified_base 9: mod_base = cm
  modified_base 10: mod_base = um
  modified_base 10..11: mod_base = OTHER; note = S-phosphorothioate
  modified_base 11: mod_base = um
  modified_base 11..12: mod_base = OTHER; note R-N-(1,3-dimethylimidazolidin-2-ylidene)phosphoramidate
  modified_base 12: mod_base = cm
  modified_base 13: mod_base = OTHER; note = 2-fluororibose adenine
  modified_base 13..14: mod_base = OTHER; note = S-phosphorothioate
  modified_base 14: mod_base = OTHER; note = 2-fluororibose guanine
  modified_base 14..15: mod_base = OTHER; note R-N-(1,3-dimethylimidazolidin-2-ylidene)phosphoramidate
  modified_base 15: mod_base = um
  modified_base 16: mod_base = cm
  modified_base 16..17: mod_base = OTHER; note = S-phosphorothioate
  modified_base 17: mod_base = cm
  modified_base 18: mod_base = OTHER; note = 2-fluororibose cytosine
  modified_base 18..19: mod_base = OTHER; note = S-phosphorothioate
  modified_base 19: mod_base = OTHER; note = 2-fluororibose uracil
  modified_base 19..20: mod_base = OTHER; note R-N-(1,3-dimethylimidazolidin-2-ylidene)phosphoramidate
  modified_base 20: mod_base = OTHER; note = 2-fluororibose uracil
  modified_base 20..21: mod_base = OTHER; note = S-phosphorothioate
  modified_base 21: mod_base = um
  modified_base 22: mod_base = OTHER; note = 2-fluororibose cytosine
  modified_base 22..23: mod_base = OTHER; note = S-phosphorothioate
  modified_base 23: mod_base = OTHER; note = deoxyribose thymine
  modified_base 23..24: mod_base = OTHER; note = S-phosphorothioate
  modified_base 24: mod_base = OTHER; note = deoxyribose uracil (position 3 connectivity)
  modified_base 24..25: mod_base = OTHER; note = S-phosphorothioate
  modified_base 25: mod_base = OTHER; note = deoxyribose inosine
  modified_base 25..26: mod_base = OTHER; note S-N-(1,3-dimethylimidazolidin-2-ylidene)phosphoramidate
  modified_base 26: mod_base = um
  modified_base 27: mod_base = OTHER; note = 2-fluororibose cytosine
  modified_base 27..28: mod_base = OTHER; note = S-phosphorothioate
  modified_base 28: mod_base = gm
  modified_base 28..29: mod_base = OTHER; note = S-phosphorothioate
  modified_base 29: mod_base = OTHER; note = 2-O-methylribose adenine
  modified_base 29..30: mod_base = OTHER; note R-N-(1,3-dimethylimidazolidin-2-ylidene)phosphoramidate
  modified_base 30: mod_base = um
  source 1..30: mol_type = other RNA

SEQ ID NO: 763 - RNA, 30 nt, synthetic construct; identical to SEQ ID NO: 273
  misc_feature 1..30: note = Synthetic: WV-46421
  misc_feature 1..30: note = Synthetic: ADR-0104078
  modified_base 1: mod_base = cm
  modified_base 1..2: mod_base = OTHER; note R-N-(1,3-dimethylimidazolidin-2-ylidene)phosphoramidate
  modified_base 2: mod_base = cm
  modified_base 2..3: mod_base = OTHER; note = S-phosphorothioate
  modified_base 3: mod_base = cm
  modified_base 3..4: mod_base = OTHER; note = S-phosphorothioate
  modified_base 4: mod_base = OTHER; note = 2-fluororibose adenine
  modified_base 4..5: mod_base = OTHER; note = S-phosphorothioate
  modified_base 5: mod_base = OTHER; note = 2-fluororibose guanine
  modified_base 5..6: mod_base = OTHER; note = S-phosphorothioate
  modified_base 6: mod_base = OTHER; note = 2-fluororibose cytosine
  modified_base 7: mod_base = OTHER; note = 2-O-methylribose adenine
  modified_base 7..8: mod_base = OTHER; note = S-phosphorothioate
  modified_base 8: mod_base = OTHER; note = 2-fluororibose guanine
  modified_base 8..9: mod_base = OTHER; note = S-phosphorothioate
  modified_base 9: mod_base = cm
  modified_base 10: mod_base = um
  modified_base 10..11: mod_base = OTHER; note = S-phosphorothioate
  modified_base 11: mod_base = um
  modified_base 11..12: mod_base = OTHER; note R-N-(1,3-dimethylimidazolidin-2-ylidene)phosphoramidate
  modified_base 12: mod_base = cm
  modified_base 13: mod_base = OTHER; note = 2-fluororibose adenine
  modified_base 13..14: mod_base = OTHER; note = S-phosphorothioate
  modified_base 14: mod_base = OTHER; note = 2-fluororibose guanine
  modified_base 14..15: mod_base = OTHER; note R-N-(1,3-dimethylimidazolidin-2-ylidene)phosphoramidate
  modified_base 15: mod_base = um
  modified_base 16: mod_base = cm
  modified_base 16..17: mod_base = OTHER; note = S-phosphorothioate
  modified_base 17: mod_base = OTHER; note = 2-fluororibose cytosine
  modified_base 17..18: mod_base = OTHER; note = S-phosphorothioate
  modified_base 18: mod_base = OTHER; note = 2-fluororibose cytosine
  modified_base 18..19: mod_base = OTHER; note = S-phosphorothioate
  modified_base 19: mod_base = OTHER; note = 2-fluororibose uracil
  modified_base 19..20: mod_base = OTHER; note R-N-(1,3-dimethylimidazolidin-2-ylidene)phosphoramidate
  modified_base 20: mod_base = um
  modified_base 21: mod_base = um
  modified_base 22: mod_base = OTHER; note = 2-fluororibose cytosine
  modified_base 22..23: mod_base = OTHER; note = S-phosphorothioate
  modified_base 23: mod_base = OTHER; note = deoxyribose thymine
  modified_base 23..24: mod_base = OTHER; note = S-phosphorothioate
  modified_base 24: mod_base = OTHER; note = deoxyribose uracil (position 3 connectivity)
  modified_base 24..25: mod_base = OTHER; note = S-phosphorothioate
  modified_base 25: mod_base = OTHER; note = deoxyribose inosine
  modified_base 25..26: mod_base = OTHER; note S-N-(1,3-dimethylimidazolidin-2-ylidene)phosphoramidate
  modified_base 26: mod_base = um
  modified_base 27: mod_base = OTHER; note = 2-fluororibose cytosine
  modified_base 27..28: mod_base = OTHER; note = S-phosphorothioate
  modified_base 28: mod_base = gm
  modified_base 28..29: mod_base = OTHER; note = S-phosphorothioate
  modified_base 29: mod_base = OTHER; note = 2-O-methylribose adenine
  modified_base 29..30: mod_base = OTHER; note R-N-(1,3-dimethylimidazolidin-2-ylidene)phosphoramidate
  modified_base 30: mod_base = um
  source 1..30: mol_type = other RNA

SEQ ID NO: 764 - RNA, 30 nt, synthetic construct; identical to SEQ ID NO: 273
  misc_feature 1..30: note = Synthetic: WV-46422
  misc_feature 1..30: note = Synthetic: ADR-0104080
  modified_base 1: mod_base = cm
  modified_base 1..2: mod_base = OTHER; note R-N-(1,3-dimethylimidazolidin-2-ylidene)phosphoramidate
  modified_base 2: mod_base = cm
  modified_base 2..3: mod_base = OTHER; note = S-phosphorothioate
  modified_base 3: mod_base = cm
  modified_base 3..4: mod_base = OTHER; note = S-phosphorothioate
  modified_base 4: mod_base = OTHER; note = 2-fluororibose adenine
  modified_base 4..5: mod_base = OTHER; note = S-phosphorothioate
  modified_base 5: mod_base = OTHER; note = 2-fluororibose guanine
  modified_base 5..6: mod_base = OTHER; note = S-phosphorothioate
  modified_base 6: mod_base = OTHER; note = 2-fluororibose cytosine
  modified_base 7: mod_base = OTHER; note = 2-O-methylribose adenine
  modified_base 7..8: mod_base = OTHER; note = S-phosphorothioate
  modified_base 8: mod_base = OTHER; note = 2-fluororibose guanine
  modified_base 8..9: mod_base = OTHER; note = S-phosphorothioate
  modified_base 9: mod_base = cm
  modified_base 10: mod_base = um
  modified_base 10..11: mod_base = OTHER; note = S-phosphorothioate
  modified_base 11: mod_base = um
  modified_base 11..12: mod_base = OTHER; note R-N-(1,3-dimethylimidazolidin-2-ylidene)phosphoramidate
  modified_base 12: mod_base = cm
  modified_base 13: mod_base = OTHER; note = 2-fluororibose adenine
  modified_base 13..14: mod_base = OTHER; note = S-phosphorothioate
  modified_base 14: mod_base = OTHER; note = 2-fluororibose guanine
  modified_base 14..15: mod_base = OTHER; note R-N-(1,3-dimethylimidazolidin-2-ylidene)phosphoramidate
  modified_base 15: mod_base = um
  modified_base 16: mod_base = cm
  modified_base 16..17: mod_base = OTHER; note = S-phosphorothioate
  modified_base 17: mod_base = cm
  modified_base 18: mod_base = cm
  modified_base 19: mod_base = OTHER; note = 2-fluororibose uracil
  modified_base 19..20: mod_base = OTHER; note R-N-(1,3-dimethylimidazolidin-2-ylidene)phosphoramidate
  modified_base 20: mod_base = OTHER; note = 2-fluororibose uracil
  modified_base 20..21: mod_base = OTHER; note = S-phosphorothioate
  modified_base 21: mod_base = um
  modified_base 22: mod_base = OTHER; note = 2-fluororibose cytosine
  modified_base 22..23: mod_base = OTHER; note = S-phosphorothioate
  modified_base 23: mod_base = OTHER; note = deoxyribose thymine
  modified_base 23..24: mod_base = OTHER; note = S-phosphorothioate
  modified_base 24: mod_base = OTHER; note = deoxyribose uracil (position 3 connectivity)
  modified_base 24..25: mod_base = OTHER; note = S-phosphorothioate
  modified_base 25: mod_base = OTHER; note = deoxyribose inosine
  modified_base 25..26: mod_base = OTHER; note S-N-(1,3-dimethylimidazolidin-2-ylidene)phosphoramidate
  modified_base 26: mod_base = um
  modified_base 27: mod_base = OTHER; note = 2-fluororibose cytosine
  modified_base 27..28: mod_base = OTHER; note = S-phosphorothioate
  modified_base 28: mod_base = gm
  modified_base 28..29: mod_base = OTHER; note = S-phosphorothioate
  modified_base 29: mod_base = OTHER; note = 2-O-methylribose adenine
  modified_base 29..30: mod_base = OTHER; note R-N-(1,3-dimethylimidazolidin-2-ylidene)phosphoramidate
  modified_base 30: mod_base = um
  source 1..30: mol_type = other RNA

SEQ ID NO: 765 - RNA, 30 nt, synthetic construct; identical to SEQ ID NO: 273
  misc_feature 1..30: note = Synthetic: WV-46423
  misc_feature 1..30: note = Synthetic: ADR-0104081
  modified_base 1: mod_base = cm
  modified_base 1..2: mod_base = OTHER; note R-N-(1,3-dimethylimidazolidin-2-ylidene)phosphoramidate
  modified_base 2: mod_base = cm
  modified_base 2..3: mod_base = OTHER; note = S-phosphorothioate
  modified_base 3: mod_base = cm
  modified_base 3..4: mod_base = OTHER; note = S-phosphorothioate
  modified_base 4: mod_base = OTHER; note = 2-fluororibose adenine
  modified_base 4..5: mod_base = OTHER; note = S-phosphorothioate
  modified_base 5: mod_base = OTHER; note = 2-fluororibose guanine
  modified_base 5..6: mod_base = OTHER; note = S-phosphorothioate
  modified_base 6: mod_base = OTHER; note = 2-fluororibose cytosine
  modified_base 7: mod_base = OTHER; note = 2-O-methylribose adenine
  modified_base 7..8: mod_base = OTHER; note = S-phosphorothioate
  modified_base 8: mod_base = OTHER; note = 2-fluororibose guanine
  modified_base 8..9: mod_base = OTHER; note = S-phosphorothioate
  modified_base 9: mod_base = cm
  modified_base 10: mod_base = um
  modified_base 10..11: mod_base = OTHER; note = S-phosphorothioate
  modified_base 11: mod_base = um
  modified_base 11..12: mod_base = OTHER; note R-N-(1,3-dimethylimidazolidin-2-ylidene)phosphoramidate
  modified_base 12: mod_base = cm
  modified_base 13: mod_base = OTHER; note = 2-fluororibose adenine
  modified_base 13..14: mod_base = OTHER; note = S-phosphorothioate
  modified_base 14: mod_base = OTHER; note = 2-fluororibose guanine
  modified_base 14..15: mod_base = OTHER; note R-N-(1,3-dimethylimidazolidin-2-ylidene)phosphoramidate
  modified_base 15: mod_base = um
  modified_base 16: mod_base = cm
  modified_base 16..17: mod_base = OTHER; note = S-phosphorothioate
  modified_base 17: mod_base = cm
  modified_base 18: mod_base = cm
  modified_base 19: mod_base = OTHER; note = 2-fluororibose uracil
  modified_base 19..20: mod_base = OTHER; note R-N-(1,3-dimethylimidazolidin-2-ylidene)phosphoramidate
  modified_base 20: mod_base = um
  modified_base 21: mod_base = um
  modified_base 22: mod_base = OTHER; note = 2-fluororibose cytosine
  modified_base 22..23: mod_base = OTHER; note = S-phosphorothioate
  modified_base 23: mod_base = OTHER; note = deoxyribose thymine
  modified_base 23..24: mod_base = OTHER; note = S-phosphorothioate
  modified_base 24: mod_base = OTHER; note = deoxyribose uracil (position 3 connectivity)
  modified_base 24..25: mod_base = OTHER; note = S-phosphorothioate
  modified_base 25: mod_base = OTHER; note = deoxyribose inosine
  modified_base 25..26: mod_base = OTHER; note S-N-(1,3-dimethylimidazolidin-2-ylidene)phosphoramidate
  modified_base 26: mod_base = um
  modified_base 27: mod_base = OTHER; note = 2-fluororibose cytosine
  modified_base 27..28: mod_base = OTHER; note = S-phosphorothioate
  modified_base 28: mod_base = gm
  modified_base 28..29: mod_base = OTHER; note = S-phosphorothioate
  modified_base 29: mod_base = OTHER; note = 2-O-methylribose adenine
  modified_base 29..30: mod_base = OTHER; note R-N-(1,3-dimethylimidazolidin-2-ylidene)phosphoramidate
  modified_base 30: mod_base = um
  source 1..30: mol_type = other RNA

SEQ ID NO: 766 - RNA, 30 nt, synthetic construct; identical to SEQ ID NO: 273
  misc_feature 1..30: note = Synthetic: WV-46424
  misc_feature 1..30: note = Synthetic: ADR-0104082
  modified_base 1: mod_base = cm
  modified_base 1..2: mod_base = OTHER; note R-N-(1,3-dimethylimidazolidin-2-ylidene)phosphoramidate
  modified_base 2: mod_base = cm
  modified_base 2..3: mod_base = OTHER; note = S-phosphorothioate
  modified_base 3: mod_base = cm
  modified_base 3..4: mod_base = OTHER; note = S-phosphorothioate
  modified_base 4: mod_base = OTHER; note = 2-fluororibose adenine
  modified_base 4..5: mod_base = OTHER; note = S-phosphorothioate
  modified_base 5: mod_base = OTHER; note = 2-fluororibose guanine
  modified_base 5..6: mod_base = OTHER; note = S-phosphorothioate
  modified_base 6: mod_base = OTHER; note = 2-fluororibose cytosine
  modified_base 7: mod_base = OTHER; note = 2-O-methylribose adenine
  modified_base 7..8: mod_base = OTHER; note = S-phosphorothioate
  modified_base 8: mod_base = OTHER; note = 2-fluororibose guanine
  modified_base 8..9: mod_base = OTHER; note = S-phosphorothioate
  modified_base 9: mod_base = cm
  modified_base 10: mod_base = um
  modified_base 10..11: mod_base = OTHER; note = S-phosphorothioate
  modified_base 11: mod_base = um
  modified_base 11..12: mod_base = OTHER; note R-N-(1,3-dimethylimidazolidin-2-ylidene)phosphoramidate
  modified_base 12: mod_base = cm
  modified_base 13: mod_base = OTHER; note = 2-fluororibose adenine
  modified_base 13..14: mod_base = OTHER; note = S-phosphorothioate
  modified_base 14: mod_base = OTHER; note = 2-fluororibose guanine
  modified_base 14..15: mod_base = OTHER; note R-N-(1,3-dimethylimidazolidin-2-ylidene)phosphoramidate
  modified_base 15: mod_base = um
  modified_base 16: mod_base = cm
  modified_base 16..17: mod_base = OTHER; note = S-phosphorothioate
  modified_base 17: mod_base = cm
  modified_base 18: mod_base = cm
  modified_base 19: mod_base = um
  modified_base 19..20: mod_base = OTHER; note R-N-(1,3-dimethylimidazolidin-2-ylidene)phosphoramidate
  modified_base 20: mod_base = um
  modified_base 21: mod_base = um
  modified_base 22: mod_base = OTHER; note = 2-fluororibose cytosine
  modified_base 22..23: mod_base = OTHER; note = S-phosphorothioate
  modified_base 23: mod_base = OTHER; note = deoxyribose thymine
  modified_base 23..24: mod_base = OTHER; note = S-phosphorothioate
  modified_base 24: mod_base = OTHER; note = deoxyribose uracil (position 3 connectivity)
  modified_base 24..25: mod_base = OTHER; note = S-phosphorothioate
  modified_base 25: mod_base = OTHER; note = deoxyribose inosine
  modified_base 25..26: mod_base = OTHER; note S-N-(1,3-dimethylimidazolidin-2-ylidene)phosphoramidate
  modified_base 26: mod_base = um
  modified_base 27: mod_base = OTHER; note = 2-fluororibose cytosine
  modified_base 27..28: mod_base = OTHER; note = S-phosphorothioate
  modified_base 28: mod_base = gm
  modified_base 28..29: mod_base = OTHER; note = S-phosphorothioate
  modified_base 29: mod_base = OTHER; note = 2-O-methylribose adenine
  modified_base 29..30: mod_base = OTHER; note R-N-(1,3-dimethylimidazolidin-2-ylidene)phosphoramidate
  modified_base 30: mod_base = um
  source 1..30: mol_type = other RNA

SEQ ID NO: 767 - RNA, 30 nt, synthetic construct; identical to SEQ ID NO: 273
  misc_feature 1..30: note = Synthetic: WV-46425
  misc_feature 1..30: note = Synthetic: ADR-0104255
  modified_base 1: mod_base = cm
  modified_base 1..2: mod_base = OTHER; note R-N-(1,3-dimethylimidazolidin-2-ylidene)phosphoramidate
  modified_base 2: mod_base = cm
  modified_base 2..3: mod_base = OTHER; note = S-phosphorothioate
  modified_base 3: mod_base = cm
  modified_base 3..4: mod_base = OTHER; note = S-phosphorothioate
  modified_base 4: mod_base = OTHER; note = 2-fluororibose adenine
  modified_base 4..5: mod_base = OTHER; note = S-phosphorothioate
  modified_base 5: mod_base = OTHER; note = 2-fluororibose guanine
  modified_base 5..6: mod_base = OTHER; note = S-phosphorothioate
  modified_base 6: mod_base = cm
  modified_base 7: mod_base = OTHER; note = 2-O-methylribose adenine
  modified_base 7..8: mod_base = OTHER; note = S-phosphorothioate
  modified_base 8: mod_base = OTHER; note = 2-fluororibose guanine
  modified_base 8..9: mod_base = OTHER; note = S-phosphorothioate
  modified_base 9: mod_base = cm
  modified_base 10: mod_base = um
  modified_base 10..11: mod_base = OTHER; note = S-phosphorothioate
  modified_base 11: mod_base = um
  modified_base 11..12: mod_base = OTHER; note R-N-(1,3-dimethylimidazolidin-2-ylidene)phosphoramidate
  modified_base 12: mod_base = cm
  modified_base 13: mod_base = OTHER; note = 2-fluororibose adenine
  modified_base 13..14: mod_base = OTHER; note = S-phosphorothioate
  modified_base 14: mod_base = OTHER; note = 2-fluororibose guanine
  modified_base 14..15: mod_base = OTHER; note R-N-(1,3-dimethylimidazolidin-2-ylidene)phosphoramidate
  modified_base 15: mod_base = um
  modified_base 16: mod_base = cm
  modified_base 16..17: mod_base = OTHER; note = S-phosphorothioate
  modified_base 17: mod_base = cm
  modified_base 18: mod_base = cm
  modified_base 19: mod_base = um
  modified_base 19..20: mod_base = OTHER; note R-N-(1,3-dimethylimidazolidin-2-ylidene)phosphoramidate
  modified_base 20: mod_base = um
  modified_base 21: mod_base = um
  modified_base 22: mod_base = OTHER; note = 2-fluororibose cytosine
  modified_base 22..23: mod_base = OTHER; note = S-phosphorothioate
  modified_base 23: mod_base = OTHER; note = deoxyribose thymine
  modified_base 23..24: mod_base = OTHER; note = S-phosphorothioate
  modified_base 24: mod_base = OTHER; note = deoxyribose uracil (position 3 connectivity)
  modified_base 24..25: mod_base = OTHER; note = S-phosphorothioate
  modified_base 25: mod_base = OTHER; note = deoxyribose inosine
  modified_base 25..26: mod_base = OTHER; note S-N-(1,3-dimethylimidazolidin-2-ylidene)phosphoramidate
  modified_base 26: mod_base = um
  modified_base 27: mod_base = OTHER; note = 2-fluororibose cytosine
  modified_base 27..28: mod_base = OTHER; note = S-phosphorothioate
  modified_base 28: mod_base = gm
  modified_base 28..29: mod_base = OTHER; note = S-phosphorothioate
  modified_base 29: mod_base = OTHER; note = 2-O-methylribose adenine
  modified_base 29..30: mod_base = OTHER; note R-N-(1,3-dimethylimidazolidin-2-ylidene)phosphoramidate
  modified_base 30: mod_base = um
  source 1..30: mol_type = other RNA

SEQ ID NO: 768 - RNA, 30 nt, synthetic construct; identical to SEQ ID NO: 273
  misc_feature 1..30: note = Synthetic: WV-46426
  misc_feature 1..30: note = Synthetic: ADR-0104269
  modified_base 1: mod_base = cm
  modified_base 1..2: mod_base = OTHER; note R-N-(1,3-dimethylimidazolidin-2-ylidene)phosphoramidate
  modified_base 2: mod_base = cm
  modified_base 2..3: mod_base = OTHER; note = S-phosphorothioate
  modified_base 3: mod_base = cm
  modified_base 3..4: mod_base = OTHER; note = S-phosphorothioate
  modified_base 4: mod_base = OTHER; note = 2-fluororibose adenine
  modified_base 4..5: mod_base = OTHER; note = S-phosphorothioate
  modified_base 5: mod_base = OTHER; note = 2-fluororibose guanine
  modified_base 5..6: mod_base = OTHER; note = S-phosphorothioate
  modified_base 6: mod_base = cm
  modified_base 7: mod_base = OTHER; note = 2-O-methylribose adenine
  modified_base 8: mod_base = OTHER; note = 2-fluororibose guanine
  modified_base 8..9: mod_base = OTHER; note = S-phosphorothioate
  modified_base 9: mod_base = OTHER; note = 2-fluororibose cytosine
  modified_base 9..10: mod_base = OTHER; note = S-phosphorothioate
  modified_base 10: mod_base = um
  modified_base 11: mod_base = OTHER; note = 2-fluororibose uracil
  modified_base 11..12: mod_base = OTHER; note R-N-(1,3-dimethylimidazolidin-2-ylidene)phosphoramidate
  modified_base 12: mod_base = cm
  modified_base 13: mod_base = OTHER; note = 2-fluororibose adenine
  modified_base 13..14: mod_base = OTHER; note = S-phosphorothioate
  modified_base 14: mod_base = OTHER; note = 2-fluororibose guanine
  modified_base 14..15: mod_base = OTHER; note R-N-(1,3-dimethylimidazolidin-2-ylidene)phosphoramidate
  modified_base 15: mod_base = OTHER; note = 2-fluororibose uracil
  modified_base 16: mod_base = cm
  modified_base 16..17: mod_base = OTHER; note = S-phosphorothioate
  modified_base 17: mod_base = OTHER; note = 2-fluororibose cytosine
  modified_base 17..18: mod_base = OTHER; note = S-phosphorothioate
  modified_base 18: mod_base = cm
  modified_base 19: mod_base = um
  modified_base 19..20: mod_base = OTHER; note R-N-(1,3-dimethylimidazolidin-2-ylidene)phosphoramidate
  modified_base 20: mod_base = um
  modified_base 21: mod_base = um
  modified_base 22: mod_base = OTHER; note = 2-fluororibose cytosine
  modified_base 22..23: mod_base = OTHER; note = S-phosphorothioate
  modified_base 23: mod_base = OTHER; note = deoxyribose thymine
  modified_base 23..24: mod_base = OTHER; note = S-phosphorothioate
  modified_base 24: mod_base = OTHER; note = deoxyribose uracil (position 3 connectivity)
  modified_base 24..25: mod_base = OTHER; note = S-phosphorothioate
  modified_base 25: mod_base = OTHER; note = deoxyribose inosine
  modified_base 25..26: mod_base = OTHER; note S-N-(1,3-dimethylimidazolidin-2-ylidene)phosphoramidate
  modified_base 26: mod_base = um
  modified_base 27: mod_base = OTHER; note = 2-fluororibose cytosine
  modified_base 27..28: mod_base = OTHER; note = S-phosphorothioate
  modified_base 28: mod_base = gm
  modified_base 28..29: mod_base = OTHER; note = S-phosphorothioate
  modified_base 29: mod_base = OTHER; note = 2-O-methylribose adenine
  modified_base 29..30: mod_base = OTHER; note R-N-(1,3-dimethylimidazolidin-2-ylidene)phosphoramidate
  modified_base 30: mod_base = um
  source 1..30: mol_type = other RNA

SEQ ID NO: 769 - RNA, 30 nt, synthetic construct; identical to SEQ ID NO: 273
  misc_feature 1..30: note = Synthetic: WV-46427
  misc_feature 1..30: note = Synthetic: ADR-0104270
  modified_base 1: mod_base = cm
  modified_base 1..2: mod_base = OTHER; note R-N-(1,3-dimethylimidazolidin-2-ylidene)phosphoramidate
  modified_base 2: mod_base = cm
  modified_base 2..3: mod_base = OTHER; note = S-phosphorothioate
  modified_base 3: mod_base = cm
  modified_base 3..4: mod_base = OTHER; note = S-phosphorothioate
  modified_base 4: mod_base = OTHER; note = 2-fluororibose adenine
  modified_base 4..5: mod_base = OTHER; note = S-phosphorothioate
  modified_base 5: mod_base = OTHER; note = 2-fluororibose guanine
  modified_base 5..6: mod_base = OTHER; note = S-phosphorothioate
  modified_base 6: mod_base = cm
  modified_base 7: mod_base = OTHER; note = 2-O-methylribose adenine
  modified_base 8: mod_base = OTHER; note = 2-fluororibose guanine
  modified_base 8..9: mod_base = OTHER; note = S-phosphorothioate
  modified_base 9: mod_base = OTHER; note = 2-fluororibose cytosine
  modified_base 9..10: mod_base = OTHER; note = S-phosphorothioate
  modified_base 10: mod_base = um
  modified_base 11: mod_base = OTHER; note = 2-fluororibose uracil
  modified_base 11..12: mod_base = OTHER; note R-N-(1,3-dimethylimidazolidin-2-ylidene)phosphoramidate
  modified_base 12: mod_base = cm
  modified_base 13: mod_base = OTHER; note = 2-fluororibose adenine
  modified_base 13..14: mod_base = OTHER; note = S-phosphorothioate
  modified_base 14: mod_base = OTHER; note = 2-fluororibose guanine
  modified_base 14..15: mod_base = OTHER; note R-N-(1,3-dimethylimidazolidin-2-ylidene)phosphoramidate
  modified_base 15: mod_base = OTHER; note = 2-fluororibose uracil
  modified_base 16: mod_base = cm
  modified_base 16..17: mod_base = OTHER; note = S-phosphorothioate
  modified_base 17: mod_base = cm
  modified_base 18: mod_base = cm
  modified_base 19: mod_base = um
  modified_base 19..20: mod_base = OTHER; note R-N-(1,3-dimethylimidazolidin-2-ylidene)phosphoramidate
  modified_base 20: mod_base = um
  modified_base 21: mod_base = um
  modified_base 22: mod_base = OTHER; note = 2-fluororibose cytosine
  modified_base 22..23: mod_base = OTHER; note = S-phosphorothioate
  modified_base 23: mod_base = OTHER; note = deoxyribose thymine
  modified_base 23..24: mod_base = OTHER; note = S-phosphorothioate
  modified_base 24: mod_base = OTHER; note = deoxyribose uracil (position 3 connectivity)
  modified_base 24..25: mod_base = OTHER; note = S-phosphorothioate
  modified_base 25: mod_base = OTHER; note = deoxyribose inosine
  modified_base 25..26: mod_base = OTHER; note S-N-(1,3-dimethylimidazolidin-2-ylidene)phosphoramidate
  modified_base 26: mod_base = um
  modified_base 27: mod_base = OTHER; note = 2-fluororibose cytosine
  modified_base 27..28: mod_base = OTHER; note = S-phosphorothioate
  modified_base 28: mod_base = gm
  modified_base 28..29: mod_base = OTHER; note = S-phosphorothioate
  modified_base 29: mod_base = OTHER; note = 2-O-methylribose adenine
  modified_base 29..30: mod_base = OTHER; note R-N-(1,3-dimethylimidazolidin-2-ylidene)phosphoramidate
  modified_base 30: mod_base = um
  source 1..30: mol_type = other RNA

SEQ ID NO: 770 - RNA, 30 nt, synthetic construct; identical to SEQ ID NO: 273
  misc_feature 1..30: note = Synthetic: WV-46428
  misc_feature 1..30: note = Synthetic: ADR-0104271
  modified_base 1: mod_base = cm
  modified_base 1..2: mod_base = OTHER; note R-N-(1,3-dimethylimidazolidin-2-ylidene)phosphoramidate
  modified_base 2: mod_base = cm
  modified_base 2..3: mod_base = OTHER; note = S-phosphorothioate
  modified_base 3: mod_base = cm
  modified_base 3..4: mod_base = OTHER; note = S-phosphorothioate
  modified_base 4: mod_base = OTHER; note = 2-fluororibose adenine
  modified_base 4..5: mod_base = OTHER; note = S-phosphorothioate
  modified_base 5: mod_base = OTHER; note = 2-fluororibose guanine
  modified_base 5..6: mod_base = OTHER; note = S-phosphorothioate
  modified_base 6: mod_base = cm
  modified_base 7: mod_base = OTHER; note = 2-O-methylribose adenine
  modified_base 8: mod_base = OTHER; note = 2-fluororibose guanine
  modified_base 8..9: mod_base = OTHER; note = S-phosphorothioate
  modified_base 9: mod_base = OTHER; note = 2-fluororibose cytosine
  modified_base 9..10: mod_base = OTHER; note = S-phosphorothioate
  modified_base 10: mod_base = um
  modified_base 11: mod_base = OTHER; note = 2-fluororibose uracil
  modified_base 11..12: mod_base = OTHER; note R-N-(1,3-dimethylimidazolidin-2-ylidene)phosphoramidate
  modified_base 12: mod_base = cm
  modified_base 13: mod_base = OTHER; note = 2-fluororibose adenine
  modified_base 13..14: mod_base = OTHER; note = S-phosphorothioate
  modified_base 14: mod_base = OTHER; note = 2-fluororibose guanine
  modified_base 14..15: mod_base = OTHER; note R-N-(1,3-dimethylimidazolidin-2-ylidene)phosphoramidate
  modified_base 15: mod_base = um
  modified_base 16: mod_base = cm
  modified_base 16..17: mod_base = OTHER; note = S-phosphorothioate
  modified_base 17: mod_base = OTHER; note = 2-fluororibose cytosine
  modified_base 17..18: mod_base = OTHER; note = S-phosphorothioate
  modified_base 18: mod_base = cm
  modified_base 19: mod_base = um
  modified_base 19..20: mod_base = OTHER; note R-N-(1,3-dimethylimidazolidin-2-ylidene)phosphoramidate
  modified_base 20: mod_base = um
  modified_base 21: mod_base = um
  modified_base 22: mod_base = OTHER; note = 2-fluororibose cytosine
  modified_base 22..23: mod_base = OTHER; note = S-phosphorothioate
  modified_base 23: mod_base = OTHER; note = deoxyribose thymine
  modified_base 23..24: mod_base = OTHER; note = S-phosphorothioate
  modified_base 24: mod_base = OTHER; note = deoxyribose uracil (position 3 connectivity)
  modified_base 24..25: mod_base = OTHER; note = S-phosphorothioate
  modified_base 25: mod_base = OTHER; note = deoxyribose inosine
  modified_base 25..26: mod_base = OTHER; note S-N-(1,3-dimethylimidazolidin-2-ylidene)phosphoramidate
  modified_base 26: mod_base = um
  modified_base 27: mod_base = OTHER; note = 2-fluororibose cytosine
  modified_base 27..28: mod_base = OTHER; note = S-phosphorothioate
  modified_base 28: mod_base = gm
  modified_base 28..29: mod_base = OTHER; note = S-phosphorothioate
  modified_base 29: mod_base = OTHER; note = 2-O-methylribose adenine
  modified_base 29..30: mod_base = OTHER; note R-N-(1,3-dimethylimidazolidin-2-ylidene)phosphoramidate
  modified_base 30: mod_base = um
  source 1..30: mol_type = other RNA

SEQ ID NO: 771 - RNA, 30 nt, synthetic construct; identical to SEQ ID NO: 273
  misc_feature 1..30: note = Synthetic: WV-46429
  misc_feature 1..30: note = Synthetic: ADR-0104278
  modified_base 1: mod_base = cm
  modified_base 1..2: mod_base = OTHER; note R-N-(1,3-dimethylimidazolidin-2-ylidene)phosphoramidate
  modified_base 2: mod_base = cm
  modified_base 2..3: mod_base = OTHER; note = S-phosphorothioate
  modified_base 3: mod_base = cm
  modified_base 3..4: mod_base = OTHER; note = S-phosphorothioate
  modified_base 4: mod_base = OTHER; note = 2-fluororibose adenine
  modified_base 4..5: mod_base = OTHER; note = S-phosphorothioate
  modified_base 5: mod_base = OTHER; note = 2-fluororibose guanine
  modified_base 5..6: mod_base = OTHER; note = S-phosphorothioate
  modified_base 6: mod_base = cm
  modified_base 7: mod_base = OTHER; note = 2-O-methylribose adenine
  modified_base 8: mod_base = OTHER; note = 2-fluororibose guanine
  modified_base 8..9: mod_base = OTHER; note = S-phosphorothioate
  modified_base 9: mod_base = OTHER; note = 2-fluororibose cytosine
  modified_base 9..10: mod_base = OTHER; note = S-phosphorothioate
  modified_base 10: mod_base = um
  modified_base 11: mod_base = um
  modified_base 11..12: mod_base = OTHER; note R-N-(1,3-dimethylimidazolidin-2-ylidene)phosphoramidate
  modified_base 12: mod_base = cm
  modified_base 13: mod_base = OTHER; note = 2-fluororibose adenine
  modified_base 13..14: mod_base = OTHER; note = S-phosphorothioate
  modified_base 14: mod_base = OTHER; note = 2-fluororibose guanine
  modified_base 14..15: mod_base = OTHER; note R-N-(1,3-dimethylimidazolidin-2-ylidene)phosphoramidate
  modified_base 15: mod_base = OTHER; note = 2-fluororibose uracil
  modified_base 16: mod_base = cm
  modified_base 16..17: mod_base = OTHER; note = S-phosphorothioate
  modified_base 17: mod_base = OTHER; note = 2-fluororibose cytosine
  modified_base 17..18: mod_base = OTHER; note = S-phosphorothioate
  modified_base 18: mod_base = cm
  modified_base 19: mod_base = um
  modified_base 19..20: mod_base = OTHER; note R-N-(1,3-dimethylimidazolidin-2-ylidene)phosphoramidate
  modified_base 20: mod_base = um
  modified_base 21: mod_base = um
  modified_base 22: mod_base = OTHER; note = 2-fluororibose cytosine
  modified_base 22..23: mod_base = OTHER; note = S-phosphorothioate
  modified_base 23: mod_base = OTHER; note = deoxyribose thymine
  modified_base 23..24: mod_base = OTHER; note = S-phosphorothioate
  modified_base 24: mod_base = OTHER; note = deoxyribose uracil (position 3 connectivity)
  modified_base 24..25: mod_base = OTHER; note = S-phosphorothioate
  modified_base 25: mod_base = OTHER; note = deoxyribose inosine
  modified_base 25..26: mod_base = OTHER; note S-N-(1,3-dimethylimidazolidin-2-ylidene)phosphoramidate
  modified_base 26: mod_base = um
  modified_base 27: mod_base = OTHER; note = 2-fluororibose cytosine
  modified_base 27..28: mod_base = OTHER; note = S-phosphorothioate
  modified_base 28: mod_base = gm
  modified_base 28..29: mod_base = OTHER; note = S-phosphorothioate
  modified_base 29: mod_base = OTHER; note = 2-O-methylribose adenine
  modified_base 29..30: mod_base = OTHER; note R-N-(1,3-dimethylimidazolidin-2-ylidene)phosphoramidate
  modified_base 30: mod_base = um
  source 1..30: mol_type = other RNA

SEQ ID NO: 772 - RNA, 30 nt, synthetic construct; identical to SEQ ID NO: 273
  misc_feature 1..30: note = Synthetic: WV-46430
  misc_feature 1..30: note = Synthetic: ADR-0104298
  modified_base 1: mod_base = cm
  modified_base 1..2: mod_base = OTHER; note R-N-(1,3-dimethylimidazolidin-2-ylidene)phosphoramidate
  modified_base 2: mod_base = cm
  modified_base 2..3: mod_base = OTHER; note = S-phosphorothioate
  modified_base 3: mod_base = cm
  modified_base 3..4: mod_base = OTHER; note = S-phosphorothioate
  modified_base 4: mod_base = OTHER; note = 2-fluororibose adenine
  modified_base 4..5: mod_base = OTHER; note = S-phosphorothioate
  modified_base 5: mod_base = OTHER; note = 2-fluororibose guanine
  modified_base 5..6: mod_base = OTHER; note = S-phosphorothioate
  modified_base 6: mod_base = cm
  modified_base 7: mod_base = OTHER; note = 2-O-methylribose adenine
  modified_base 8: mod_base = OTHER; note = 2-fluororibose guanine
  modified_base 8..9: mod_base = OTHER; note = S-phosphorothioate
  modified_base 9: mod_base = cm
  modified_base 10: mod_base = um
  modified_base 11: mod_base = OTHER; note = 2-fluororibose uracil
  modified_base 11..12: mod_base = OTHER; note R-N-(1,3-dimethylimidazolidin-2-ylidene)phosphoramidate
  modified_base 12: mod_base = cm
  modified_base 13: mod_base = OTHER; note = 2-fluororibose adenine
  modified_base 13..14: mod_base = OTHER; note = S-phosphorothioate
  modified_base 14: mod_base = OTHER; note = 2-fluororibose guanine
  modified_base 14..15: mod_base = OTHER; note R-N-(1,3-dimethylimidazolidin-2-ylidene)phosphoramidate
  modified_base 15: mod_base = OTHER; note = 2-fluororibose uracil
  modified_base 16: mod_base = cm
  modified_base 16..17: mod_base = OTHER; note = S-phosphorothioate
  modified_base 17: mod_base = cm
  modified_base 18: mod_base = cm
  modified_base 19: mod_base = um
  modified_base 19..20: mod_base = OTHER; note R-N-(1,3-dimethylimidazolidin-2-ylidene)phosphoramidate
  modified_base 20: mod_base = um
  modified_base 21: mod_base = um
  modified_base 22: mod_base = OTHER; note = 2-fluororibose cytosine
  modified_base 22..23: mod_base = OTHER; note = S-phosphorothioate
  modified_base 23: mod_base = OTHER; note = deoxyribose thymine
  modified_base 23..24: mod_base = OTHER; note = S-phosphorothioate
  modified_base 24: mod_base = OTHER; note = deoxyribose uracil (position 3 connectivity)
  modified_base 24..25: mod_base = OTHER; note = S-phosphorothioate
  modified_base 25: mod_base = OTHER; note = deoxyribose inosine
  modified_base 25..26: mod_base = OTHER; note S-N-(1,3-dimethylimidazolidin-2-ylidene)phosphoramidate
  modified_base 26: mod_base = um
  modified_base 27: mod_base = OTHER; note = 2-fluororibose cytosine
  modified_base 27..28: mod_base = OTHER; note = S-phosphorothioate
  modified_base 28: mod_base = gm
  modified_base 28..29: mod_base = OTHER; note = S-phosphorothioate
  modified_base 29: mod_base = OTHER; note = 2-O-methylribose adenine
  modified_base 29..30: mod_base = OTHER; note R-N-(1,3-dimethylimidazolidin-2-ylidene)phosphoramidate
  modified_base 30: mod_base = um
  source 1..30: mol_type = other RNA

SEQ ID NO: 773 - RNA, 30 nt, synthetic construct; identical to SEQ ID NO: 273
  misc_feature 1..30: note = Synthetic: WV-46431
  misc_feature 1..30: note = Synthetic: ADR-0104272
  modified_base 1: mod_base = cm
  modified_base 1..2: mod_base = OTHER; note R-N-(1,3-dimethylimidazolidin-2-ylidene)phosphoramidate
  modified_base 2: mod_base = cm
  modified_base 2..3: mod_base = OTHER; note = S-phosphorothioate
  modified_base 3: mod_base = cm
  modified_base 3..4: mod_base = OTHER; note = S-phosphorothioate
  modified_base 4: mod_base = OTHER; note = 2-fluororibose adenine
  modified_base 4..5: mod_base = OTHER; note = S-phosphorothioate
  modified_base 5: mod_base = OTHER; note = 2-fluororibose guanine
  modified_base 5..6: mod_base = OTHER; note = S-phosphorothioate
  modified_base 6: mod_base = cm
  modified_base 7: mod_base = OTHER; note = 2-O-methylribose adenine
  modified_base 8: mod_base = OTHER; note = 2-fluororibose guanine
  modified_base 8..9: mod_base = OTHER; note = S-phosphorothioate
  modified_base 9: mod_base = OTHER; note = 2-fluororibose cytosine
  modified_base 9..10: mod_base = OTHER; note = S-phosphorothioate
  modified_base 10: mod_base = um
  modified_base 11: mod_base = OTHER; note = 2-fluororibose uracil
  modified_base 11..12: mod_base = OTHER; note R-N-(1,3-dimethylimidazolidin-2-ylidene)phosphoramidate
  modified_base 12: mod_base = cm
  modified_base 13: mod_base = OTHER; note = 2-fluororibose adenine
  modified_base 13..14: mod_base = OTHER; note = S-phosphorothioate
  modified_base 14: mod_base = OTHER; note = 2-fluororibose guanine
  modified_base 14..15: mod_base = OTHER; note R-N-(1,3-dimethylimidazolidin-2-ylidene)phosphoramidate
  modified_base 15: mod_base = um
  modified_base 16: mod_base = cm
  modified_base 16..17: mod_base = OTHER; note = S-phosphorothioate
  modified_base 17: mod_base = cm
  modified_base 18: mod_base = cm
  modified_base 19: mod_base = um
  modified_base 19..20: mod_base = OTHER; note R-N-(1,3-dimethylimidazolidin-2-ylidene)phosphoramidate
  modified_base 20: mod_base = um
  modified_base 21: mod_base = um
  modified_base 22: mod_base = OTHER; note = 2-fluororibose cytosine
  modified_base 22..23: mod_base = OTHER; note = S-phosphorothioate
  modified_base 23: mod_base = OTHER; note = deoxyribose thymine
  modified_base 23..24: mod_base = OTHER; note = S-phosphorothioate
  modified_base 24: mod_base = OTHER; note = deoxyribose uracil (position 3 connectivity)
  modified_base 24..25: mod_base = OTHER; note = S-phosphorothioate
  modified_base 25: mod_base = OTHER; note = deoxyribose inosine
  modified_base 25..26: mod_base = OTHER; note S-N-(1,3-dimethylimidazolidin-2-ylidene)phosphoramidate
  modified_base 26: mod_base = um
  modified_base 27: mod_base = OTHER; note = 2-fluororibose cytosine
  modified_base 27..28: mod_base = OTHER; note = S-phosphorothioate
  modified_base 28: mod_base = gm
  modified_base 28..29: mod_base = OTHER; note = S-phosphorothioate
  modified_base 29: mod_base = OTHER; note = 2-O-methylribose adenine
  modified_base 29..30: mod_base = OTHER; note R-N-(1,3-dimethylimidazolidin-2-ylidene)phosphoramidate
  modified_base 30: mod_base = um
  source 1..30: mol_type = other RNA

SEQ ID NO: 774 - RNA, 30 nt, synthetic construct; identical to SEQ ID NO: 273
  misc_feature 1..30: note = Synthetic: WV-46432
  misc_feature 1..30: note = Synthetic: ADR-0104279
  modified_base 1: mod_base = cm
  modified_base 1..2: mod_base = OTHER; note R-N-(1,3-dimethylimidazolidin-2-ylidene)phosphoramidate
  modified_base 2: mod_base = cm
  modified_base 2..3: mod_base = OTHER; note = S-phosphorothioate
  modified_base 3: mod_base = cm
  modified_base 3..4: mod_base = OTHER; note = S-phosphorothioate
  modified_base 4: mod_base = OTHER; note = 2-fluororibose adenine
  modified_base 4..5: mod_base = OTHER; note = S-phosphorothioate
  modified_base 5: mod_base = OTHER; note = 2-fluororibose guanine
  modified_base 5..6: mod_base = OTHER; note = S-phosphorothioate
  modified_base 6: mod_base = cm
  modified_base 7: mod_base = OTHER; note = 2-O-methylribose adenine
  modified_base 8: mod_base = OTHER; note = 2-fluororibose guanine
  modified_base 8..9: mod_base = OTHER; note = S-phosphorothioate
  modified_base 9: mod_base = OTHER; note = 2-fluororibose cytosine
  modified_base 9..10: mod_base = OTHER; note = S-phosphorothioate
  modified_base 10: mod_base = um
  modified_base 11: mod_base = um
  modified_base 11..12: mod_base = OTHER; note R-N-(1,3-dimethylimidazolidin-2-ylidene)phosphoramidate
  modified_base 12: mod_base = cm
  modified_base 13: mod_base = OTHER; note = 2-fluororibose adenine
  modified_base 13..14: mod_base = OTHER; note = S-phosphorothioate
  modified_base 14: mod_base = OTHER; note = 2-fluororibose guanine
  modified_base 14..15: mod_base = OTHER; note R-N-(1,3-dimethylimidazolidin-2-ylidene)phosphoramidate
  modified_base 15: mod_base = um
  modified_base 16: mod_base = cm
  modified_base 16..17: mod_base = OTHER; note = S-phosphorothioate
  modified_base 17: mod_base = OTHER; note = 2-fluororibose cytosine
  modified_base 17..18: mod_base = OTHER; note = S-phosphorothioate
  modified_base 18: mod_base = cm
  modified_base 19: mod_base = um
  modified_base 19..20: mod_base = OTHER; note R-N-(1,3-dimethylimidazolidin-2-ylidene)phosphoramidate
  modified_base 20: mod_base = um
  modified_base 21: mod_base = um
  modified_base 22: mod_base = OTHER; note = 2-fluororibose cytosine
  modified_base 22..23: mod_base = OTHER; note = S-phosphorothioate
  modified_base 23: mod_base = OTHER; note = deoxyribose thymine
  modified_base 23..24: mod_base = OTHER; note = S-phosphorothioate
  modified_base 24: mod_base = OTHER; note = deoxyribose uracil (position 3 connectivity)
  modified_base 24..25: mod_base = OTHER; note = S-phosphorothioate
  modified_base 25: mod_base = OTHER; note = deoxyribose inosine
  modified_base 25..26: mod_base = OTHER; note S-N-(1,3-dimethylimidazolidin-2-ylidene)phosphoramidate
  modified_base 26: mod_base = um
  modified_base 27: mod_base = OTHER; note = 2-fluororibose cytosine
  modified_base 27..28: mod_base = OTHER; note = S-phosphorothioate
  modified_base 28: mod_base = gm
  modified_base 28..29: mod_base = OTHER; note = S-phosphorothioate
  modified_base 29: mod_base = OTHER; note = 2-O-methylribose adenine
  modified_base 29..30: mod_base = OTHER; note R-N-(1,3-dimethylimidazolidin-2-ylidene)phosphoramidate
  modified_base 30: mod_base = um
  source 1..30: mol_type = other RNA

SEQ ID NO: 775 - RNA, 30 nt, synthetic construct; identical to SEQ ID NO: 273
  misc_feature 1..30: note = Synthetic: WV-46433
  misc_feature 1..30: note = Synthetic: ADR-0104299
  modified_base 1: mod_base = cm
  modified_base 1..2: mod_base = OTHER; note R-N-(1,3-dimethylimidazolidin-2-ylidene)phosphoramidate
  modified_base 2: mod_base = cm
  modified_base 2..3: mod_base = OTHER; note = S-phosphorothioate
  modified_base 3: mod_base = cm
  modified_base 3..4: mod_base = OTHER; note = S-phosphorothioate
  modified_base 4: mod_base = OTHER; note = 2-fluororibose adenine
  modified_base 4..5: mod_base = OTHER; note = S-phosphorothioate
  modified_base 5: mod_base = OTHER; note = 2-fluororibose guanine
  modified_base 5..6: mod_base = OTHER; note = S-phosphorothioate
  modified_base 6: mod_base = cm
  modified_base 7: mod_base = OTHER; note = 2-O-methylribose adenine
  modified_base 8: mod_base = OTHER; note = 2-fluororibose guanine
  modified_base 8..9: mod_base = OTHER; note = S-phosphorothioate
  modified_base 9: mod_base = cm
  modified_base 10: mod_base = um
  modified_base 11: mod_base = OTHER; note = 2-fluororibose uracil
  modified_base 11..12: mod_base = OTHER; note R-N-(1,3-dimethylimidazolidin-2-ylidene)phosphoramidate
  modified_base 12: mod_base = cm
  modified_base 13: mod_base = OTHER; note = 2-fluororibose adenine
  modified_base 13..14: mod_base = OTHER; note = S-phosphorothioate
  modified_base 14: mod_base = OTHER; note = 2-fluororibose guanine
  modified_base 14..15: mod_base = OTHER; note R-N-(1,3-dimethylimidazolidin-2-ylidene)phosphoramidate
  modified_base 15: mod_base = um
  modified_base 16: mod_base = cm
  modified_base 16..17: mod_base = OTHER; note = S-phosphorothioate
  modified_base 17: mod_base = OTHER; note = 2-fluororibose cytosine
  modified_base 17..18: mod_base = OTHER; note = S-phosphorothioate
  modified_base 18: mod_base = cm
  modified_base 19: mod_base = um
  modified_base 19..20: mod_base = OTHER; note R-N-(1,3-dimethylimidazolidin-2-ylidene)phosphoramidate
  modified_base 20: mod_base = um
  modified_base 21: mod_base = um
  modified_base 22: mod_base = OTHER; note = 2-fluororibose cytosine
  modified_base 22..23: mod_base = OTHER; note = S-phosphorothioate
  modified_base 23: mod_base = OTHER; note = deoxyribose thymine
  modified_base 23..24: mod_base = OTHER; note = S-phosphorothioate
  modified_base 24: mod_base = OTHER; note = deoxyribose uracil (position 3 connectivity)
  modified_base 24..25: mod_base = OTHER; note = S-phosphorothioate
  modified_base 25: mod_base = OTHER; note = deoxyribose inosine
  modified_base 25..26: mod_base = OTHER; note S-N-(1,3-dimethylimidazolidin-2-ylidene)phosphoramidate
  modified_base 26: mod_base = um
  modified_base 27: mod_base = OTHER; note = 2-fluororibose cytosine
  modified_base 27..28: mod_base = OTHER; note = S-phosphorothioate
  modified_base 28: mod_base = gm
  modified_base 28..29: mod_base = OTHER; note = S-phosphorothioate
  modified_base 29: mod_base = OTHER; note = 2-O-methylribose adenine
  modified_base 29..30: mod_base = OTHER; note R-N-(1,3-dimethylimidazolidin-2-ylidene)phosphoramidate
  modified_base 30: mod_base = um
  source 1..30: mol_type = other RNA

SEQ ID NO: 776 - RNA, 30 nt, synthetic construct; identical to SEQ ID NO: 273
  misc_feature 1..30: note = Synthetic: WV-46434
  misc_feature 1..30: note = Synthetic: ADR-0104280
  modified_base 1: mod_base = cm
  modified_base 1..2: mod_base = OTHER; note R-N-(1,3-dimethylimidazolidin-2-ylidene)phosphoramidate
  modified_base 2: mod_base = cm
  modified_base 2..3: mod_base = OTHER; note = S-phosphorothioate
  modified_base 3: mod_base = cm
  modified_base 3..4: mod_base = OTHER; note = S-phosphorothioate
  modified_base 4: mod_base = OTHER; note = 2-fluororibose adenine
  modified_base 4..5: mod_base = OTHER; note = S-phosphorothioate
  modified_base 5: mod_base = OTHER; note = 2-fluororibose guanine
  modified_base 5..6: mod_base = OTHER; note = S-phosphorothioate
  modified_base 6: mod_base = cm
  modified_base 7: mod_base = OTHER; note = 2-O-methylribose adenine
  modified_base 8: mod_base = OTHER; note = 2-fluororibose guanine
  modified_base 8..9: mod_base = OTHER; note = S-phosphorothioate
  modified_base 9: mod_base = OTHER; note = 2-fluororibose cytosine
  modified_base 9..10: mod_base = OTHER; note = S-phosphorothioate
  modified_base 10: mod_base = um
  modified_base 11: mod_base = um
  modified_base 11..12: mod_base = OTHER; note R-N-(1,3-dimethylimidazolidin-2-ylidene)phosphoramidate
  modified_base 12: mod_base = cm
  modified_base 13: mod_base = OTHER; note = 2-fluororibose adenine
  modified_base 13..14: mod_base = OTHER; note = S-phosphorothioate
  modified_base 14: mod_base = OTHER; note = 2-fluororibose guanine
  modified_base 14..15: mod_base = OTHER; note R-N-(1,3-dimethylimidazolidin-2-ylidene)phosphoramidate
  modified_base 15: mod_base = um
  modified_base 16: mod_base = cm
  modified_base 16..17: mod_base = OTHER; note = S-phosphorothioate
  modified_base 17: mod_base = cm
  modified_base 18: mod_base = cm
  modified_base 19: mod_base = um
  modified_base 19..20: mod_base = OTHER; note R-N-(1,3-dimethylimidazolidin-2-ylidene)phosphoramidate
  modified_base 20: mod_base = um
  modified_base 21: mod_base = um
  modified_base 22: mod_base = OTHER; note = 2-fluororibose cytosine
  modified_base 22..23: mod_base = OTHER; note = S-phosphorothioate
  modified_base 23: mod_base = OTHER; note = deoxyribose thymine
  modified_base 23..24: mod_base = OTHER; note = S-phosphorothioate
  modified_base 24: mod_base = OTHER; note = deoxyribose uracil (position 3 connectivity)
  modified_base 24..25: mod_base = OTHER; note = S-phosphorothioate
  modified_base 25: mod_base = OTHER; note = deoxyribose inosine
  modified_base 25..26: mod_base = OTHER; note S-N-(1,3-dimethylimidazolidin-2-ylidene)phosphoramidate
  modified_base 26: mod_base = um
  modified_base 27: mod_base = OTHER; note = 2-fluororibose cytosine
  modified_base 27..28: mod_base = OTHER; note = S-phosphorothioate
  modified_base 28: mod_base = gm
  modified_base 28..29: mod_base = OTHER; note = S-phosphorothioate
  modified_base 29: mod_base = OTHER; note = 2-O-methylribose adenine
  modified_base 29..30: mod_base = OTHER; note R-N-(1,3-dimethylimidazolidin-2-ylidene)phosphoramidate
  modified_base 30: mod_base = um
  source 1..30: mol_type = other RNA

SEQ ID NO: 777 - RNA, 30 nt, synthetic construct; identical to SEQ ID NO: 273
  misc_feature 1..30: note = Synthetic: WV-46435
  misc_feature 1..30: note = Synthetic: ADR-0104300
  modified_base 1: mod_base = cm
  modified_base 1..2: mod_base = OTHER; note R-N-(1,3-dimethylimidazolidin-2-ylidene)phosphoramidate
  modified_base 2: mod_base = cm
  modified_base 2..3: mod_base = OTHER; note = S-phosphorothioate
  modified_base 3: mod_base = cm
  modified_base 3..4: mod_base = OTHER; note = S-phosphorothioate
  modified_base 4: mod_base = OTHER; note = 2-fluororibose adenine
  modified_base 4..5: mod_base = OTHER; note = S-phosphorothioate
  modified_base 5: mod_base = OTHER; note = 2-fluororibose guanine
  modified_base 5..6: mod_base = OTHER; note = S-phosphorothioate
  modified_base 6: mod_base = cm
  modified_base 7: mod_base = OTHER; note = 2-O-methylribose adenine
  modified_base 8: mod_base = OTHER; note = 2-fluororibose guanine
  modified_base 8..9: mod_base = OTHER; note = S-phosphorothioate
  modified_base 9: mod_base = cm
  modified_base 10: mod_base = um
  modified_base 11: mod_base = OTHER; note = 2-fluororibose uracil
  modified_base 11..12: mod_base = OTHER; note R-N-(1,3-dimethylimidazolidin-2-ylidene)phosphoramidate
  modified_base 12: mod_base = cm
  modified_base 13: mod_base = OTHER; note = 2-fluororibose adenine
  modified_base 13..14: mod_base = OTHER; note = S-phosphorothioate
  modified_base 14: mod_base = OTHER; note = 2-fluororibose guanine
  modified_base 14..15: mod_base = OTHER; note R-N-(1,3-dimethylimidazolidin-2-ylidene)phosphoramidate
  modified_base 15: mod_base = um
  modified_base 16: mod_base = cm
  modified_base 16..17: mod_base = OTHER; note = S-phosphorothioate
  modified_base 17: mod_base = cm
  modified_base 18: mod_base = cm
  modified_base 19: mod_base = um
  modified_base 19..20: mod_base = OTHER; note R-N-(1,3-dimethylimidazolidin-2-ylidene)phosphoramidate
  modified_base 20: mod_base = um
  modified_base 21: mod_base = um
  modified_base 22: mod_base = OTHER; note = 2-fluororibose cytosine
  modified_base 22..23: mod_base = OTHER; note = S-phosphorothioate
  modified_base 23: mod_base = OTHER; note = deoxyribose thymine
  modified_base 23..24: mod_base = OTHER; note = S-phosphorothioate
  modified_base 24: mod_base = OTHER; note = deoxyribose uracil (position 3 connectivity)
  modified_base 24..25: mod_base = OTHER; note = S-phosphorothioate
  modified_base 25: mod_base = OTHER; note = deoxyribose inosine
  modified_base 25..26: mod_base = OTHER; note S-N-(1,3-dimethylimidazolidin-2-ylidene)phosphoramidate
  modified_base 26: mod_base = um
  modified_base 27: mod_base = OTHER; note = 2-fluororibose cytosine
  modified_base 27..28: mod_base = OTHER; note = S-phosphorothioate
  modified_base 28: mod_base = gm
  modified_base 28..29: mod_base = OTHER; note = S-phosphorothioate
  modified_base 29: mod_base = OTHER; note = 2-O-methylribose adenine
  modified_base 29..30: mod_base = OTHER; note R-N-(1,3-dimethylimidazolidin-2-ylidene)phosphoramidate
  modified_base 30: mod_base = um
  source 1..30: mol_type = other RNA

SEQ ID NO: 778 - RNA, 30 nt, synthetic construct; identical to SEQ ID NO: 273
  misc_feature 1..30: note = Synthetic: WV-46436
  misc_feature 1..30: note = Synthetic: ADR-0104301
  modified_base 1: mod_base = cm
  modified_base 1..2: mod_base = OTHER; note R-N-(1,3-dimethylimidazolidin-2-ylidene)phosphoramidate
  modified_base 2: mod_base = cm
  modified_base 2..3: mod_base = OTHER; note = S-phosphorothioate
  modified_base 3: mod_base = cm
  modified_base 3..4: mod_base = OTHER; note = S-phosphorothioate
  modified_base 4: mod_base = OTHER; note = 2-fluororibose adenine
  modified_base 4..5: mod_base = OTHER; note = S-phosphorothioate
  modified_base 5: mod_base = OTHER; note = 2-fluororibose guanine
  modified_base 5..6: mod_base = OTHER; note = S-phosphorothioate
  modified_base 6: mod_base = cm
  modified_base 7: mod_base = OTHER; note = 2-O-methylribose adenine
  modified_base 8: mod_base = OTHER; note = 2-fluororibose guanine
  modified_base 8..9: mod_base = OTHER; note = S-phosphorothioate
  modified_base 9: mod_base = cm
  modified_base 10: mod_base = um
  modified_base 11: mod_base = um
  modified_base 11..12: mod_base = OTHER; note R-N-(1,3-dimethylimidazolidin-2-ylidene)phosphoramidate
  modified_base 12: mod_base = cm
  modified_base 13: mod_base = OTHER; note = 2-fluororibose adenine
  modified_base 13..14: mod_base = OTHER; note = S-phosphorothioate
  modified_base 14: mod_base = OTHER; note = 2-fluororibose guanine
  modified_base 14..15: mod_base = OTHER; note R-N-(1,3-dimethylimidazolidin-2-ylidene)phosphoramidate
  modified_base 15: mod_base = um
  modified_base 16: mod_base = cm
  modified_base 16..17: mod_base = OTHER; note = S-phosphorothioate
  modified_base 17: mod_base = cm
  modified_base 18: mod_base = cm
  modified_base 19: mod_base = um
  modified_base 19..20: mod_base = OTHER; note R-N-(1,3-dimethylimidazolidin-2-ylidene)phosphoramidate
  modified_base 20: mod_base = um
  modified_base 21: mod_base = um
  modified_base 22: mod_base = OTHER; note = 2-fluororibose cytosine
  modified_base 22..23: mod_base = OTHER; note = S-phosphorothioate
  modified_base 23: mod_base = OTHER; note = deoxyribose thymine
  modified_base 23..24: mod_base = OTHER; note = S-phosphorothioate
  modified_base 24: mod_base = OTHER; note = deoxyribose uracil (position 3 connectivity)
  modified_base 24..25: mod_base = OTHER; note = S-phosphorothioate
  modified_base 25: mod_base = OTHER; note = deoxyribose inosine
  modified_base 25..26: mod_base = OTHER; note S-N-(1,3-dimethylimidazolidin-2-ylidene)phosphoramidate
  modified_base 26: mod_base = um
  modified_base 27: mod_base = OTHER; note = 2-fluororibose cytosine
  modified_base 27..28: mod_base = OTHER; note = S-phosphorothioate
  modified_base 28: mod_base = gm
  modified_base 28..29: mod_base = OTHER; note = S-phosphorothioate
  modified_base 29: mod_base = OTHER; note = 2-O-methylribose adenine
  modified_base 29..30: mod_base = OTHER; note R-N-(1,3-dimethylimidazolidin-2-ylidene)phosphoramidate
  modified_base 30: mod_base = um
  source 1..30: mol_type = other RNA

SEQ ID NO: 779 - RNA, 30 nt, synthetic construct; identical to SEQ ID NO: 273
  misc_feature 1..30: note = Synthetic: WV-46437
  misc_feature 1..30: note = Synthetic: ADR-0104179
  modified_base 1: mod_base = cm
  modified_base 1..2: mod_base = OTHER; note R-N-(1,3-dimethylimidazolidin-2-ylidene)phosphoramidate
  modified_base 2: mod_base = cm
  modified_base 2..3: mod_base = OTHER; note = S-phosphorothioate
  modified_base 3: mod_base = cm
  modified_base 3..4: mod_base = OTHER; note = S-phosphorothioate
  modified_base 4: mod_base = OTHER; note = 2-fluororibose adenine
  modified_base 4..5: mod_base = OTHER; note = S-phosphorothioate
  modified_base 5: mod_base = OTHER; note = 2-fluororibose guanine
  modified_base 5..6: mod_base = OTHER; note = S-phosphorothioate
  modified_base 6: mod_base = cm
  modified_base 7: mod_base = OTHER; note = 2-O-methylribose adenine
  modified_base 7..8: mod_base = OTHER; note = S-phosphorothioate
  modified_base 8: mod_base = OTHER; note = 2-fluororibose guanine
  modified_base 8..9: mod_base = OTHER; note = S-phosphorothioate
  modified_base 9: mod_base = OTHER; note = 2-fluororibose cytosine
  modified_base 10: mod_base = um
  modified_base 10..11: mod_base = OTHER; note = S-phosphorothioate
  modified_base 11: mod_base = OTHER; note = 2-fluororibose uracil
  modified_base 11..12: mod_base = OTHER; note R-N-(1,3-dimethylimidazolidin-2-ylidene)phosphoramidate
  modified_base 12: mod_base = cm
  modified_base 13: mod_base = OTHER; note = 2-fluororibose adenine
  modified_base 13..14: mod_base = OTHER; note = S-phosphorothioate
  modified_base 14: mod_base = OTHER; note = 2-fluororibose guanine
  modified_base 14..15: mod_base = OTHER; note R-N-(1,3-dimethylimidazolidin-2-ylidene)phosphoramidate
  modified_base 15: mod_base = OTHER; note = 2-fluororibose uracil
  modified_base 16: mod_base = cm
  modified_base 16..17: mod_base = OTHER; note = S-phosphorothioate
  modified_base 17: mod_base = OTHER; note = 2-fluororibose cytosine
  modified_base 17..18: mod_base = OTHER; note = S-phosphorothioate
  modified_base 18: mod_base = OTHER; note = 2-fluororibose cytosine
  modified_base 18..19: mod_base = OTHER; note = S-phosphorothioate
  modified_base 19: mod_base = OTHER; note = 2-fluororibose uracil
  modified_base 19..20: mod_base = OTHER; note = S-phosphorothioate
  modified_base 20: mod_base = um
  modified_base 21: mod_base = um
  modified_base 22: mod_base = OTHER; note = 2-fluororibose cytosine
  modified_base 22..23: mod_base = OTHER; note = S-phosphorothioate
  modified_base 23: mod_base = OTHER; note = deoxyribose thymine
  modified_base 23..24: mod_base = OTHER; note = S-phosphorothioate
  modified_base 24: mod_base = OTHER; note = deoxyribose uracil (position 3 connectivity)
  modified_base 24..25: mod_base = OTHER; note = S-phosphorothioate
  modified_base 25: mod_base = OTHER; note = deoxyribose inosine
  modified_base 25..26: mod_base = OTHER; note S-N-(1,3-dimethylimidazolidin-2-ylidene)phosphoramidate
  modified_base 26: mod_base = um
  modified_base 27: mod_base = OTHER; note = 2-fluororibose cytosine
  modified_base 27..28: mod_base = OTHER; note = S-phosphorothioate
  modified_base 28: mod_base = gm
  modified_base 28..29: mod_base = OTHER; note = S-phosphorothioate
  modified_base 29: mod_base = OTHER; note = 2-O-methylribose adenine
  modified_base 29..30: mod_base = OTHER; note R-N-(1,3-dimethylimidazolidin-2-ylidene)phosphoramidate
  modified_base 30: mod_base = OTHER; note = 2-O-methoxyethylribose thymine
  source 1..30: mol_type = other RNA

SEQ ID NO: 780 - RNA, 30 nt, synthetic construct; identical to SEQ ID NO: 273
  misc_feature 1..30: note = Synthetic: WV-46438
  misc_feature 1..30: note = Synthetic: ADR-0104177
  modified_base 1: mod_base = cm
  modified_base 1..2: mod_base = OTHER; note R-N-(1,3-dimethylimidazolidin-2-ylidene)phosphoramidate
  modified_base 2: mod_base = cm
  modified_base 2..3: mod_base = OTHER; note = S-phosphorothioate
  modified_base 3: mod_base = cm
  modified_base 3..4: mod_base = OTHER; note = S-phosphorothioate
  modified_base 4: mod_base = OTHER; note = 2-fluororibose adenine
  modified_base 4..5: mod_base = OTHER; note = S-phosphorothioate
  modified_base 5: mod_base = OTHER; note = 2-fluororibose guanine
  modified_base 5..6: mod_base = OTHER; note = S-phosphorothioate
  modified_base 6: mod_base = cm
  modified_base 7: mod_base = OTHER; note = 2-O-methylribose adenine
  modified_base 7..8: mod_base = OTHER; note = S-phosphorothioate
  modified_base 8: mod_base = OTHER; note = 2-fluororibose guanine
  modified_base 8..9: mod_base = OTHER; note = S-phosphorothioate
  modified_base 9: mod_base = OTHER; note = 2-fluororibose cytosine
  modified_base 10: mod_base = um
  modified_base 10..11: mod_base = OTHER; note = S-phosphorothioate
  modified_base 11: mod_base = OTHER; note = 2-fluororibose uracil
  modified_base 11..12: mod_base = OTHER; note R-N-(1,3-dimethylimidazolidin-2-ylidene)phosphoramidate
  modified_base 12: mod_base = cm
  modified_base 13: mod_base = OTHER; note = 2-fluororibose adenine
  modified_base 13..14: mod_base = OTHER; note = S-phosphorothioate
  modified_base 14: mod_base = OTHER; note = 2-fluororibose guanine
  modified_base 14..15: mod_base = OTHER; note R-N-(1,3-dimethylimidazolidin-2-ylidene)phosphoramidate
  modified_base 15: mod_base = OTHER; note = 2-fluororibose uracil
  modified_base 16: mod_base = cm
  modified_base 16..17: mod_base = OTHER; note = S-phosphorothioate
  modified_base 17: mod_base = OTHER; note = 2-fluororibose cytosine
  modified_base 17..18: mod_base = OTHER; note = S-phosphorothioate
  modified_base 18: mod_base = OTHER; note = 2-fluororibose cytosine
  modified_base 18..19: mod_base = OTHER; note = S-phosphorothioate
  modified_base 19: mod_base = OTHER; note = 2-fluororibose uracil
  modified_base 19..20: mod_base = OTHER; note = S-phosphorothioate
  modified_base 20: mod_base = um
  modified_base 21: mod_base = um
  modified_base 22: mod_base = OTHER; note = 2-fluororibose cytosine
  modified_base 22..23: mod_base = OTHER; note = S-phosphorothioate
  modified_base 23: mod_base = OTHER; note = deoxyribose thymine
  modified_base 23..24: mod_base = OTHER; note = S-phosphorothioate
  modified_base 24: mod_base = OTHER; note = deoxyribose uracil (position 3 connectivity)
  modified_base 24..25: mod_base = OTHER; note = S-phosphorothioate
  modified_base 25: mod_base = OTHER; note = deoxyribose inosine
  modified_base 25..26: mod_base = OTHER; note S-N-(1,3-dimethylimidazolidin-2-ylidene)phosphoramidate
  modified_base 26: mod_base = um
  modified_base 27: mod_base = OTHER; note = 2-fluororibose cytosine
  modified_base 27..28: mod_base = OTHER; note = S-phosphorothioate
  modified_base 28: mod_base = gm
  modified_base 28..29: mod_base = OTHER; note = S-phosphorothioate
  modified_base 29: mod_base = OTHER; note = 2-O-methoxyethylribose adenine
  modified_base 29..30: mod_base = OTHER; note R-N-(1,3-dimethylimidazolidin-2-ylidene)phosphoramidate
  modified_base 30: mod_base = OTHER; note = 2-O-methoxyethylribose thymine
  source 1..30: mol_type = other RNA

SEQ ID NO: 781 - RNA, 30 nt, synthetic construct; identical to SEQ ID NO: 273
  misc_feature 1..30: note = Synthetic: WV-46439
  misc_feature 1..30: note = Synthetic: ADR-0104176
  modified_base 1: mod_base = cm
  modified_base 1..2: mod_base = OTHER; note R-N-(1,3-dimethylimidazolidin-2-ylidene)phosphoramidate
  modified_base 2: mod_base = cm
  modified_base 2..3: mod_base = OTHER; note = S-phosphorothioate
  modified_base 3: mod_base = cm
  modified_base 3..4: mod_base = OTHER; note = S-phosphorothioate
  modified_base 4: mod_base = OTHER; note = 2-fluororibose adenine
  modified_base 4..5: mod_base = OTHER; note = S-phosphorothioate
  modified_base 5: mod_base = OTHER; note = 2-fluororibose guanine
  modified_base 5..6: mod_base = OTHER; note = S-phosphorothioate
  modified_base 6: mod_base = cm
  modified_base 7: mod_base = OTHER; note = 2-O-methylribose adenine
  modified_base 7..8: mod_base = OTHER; note = S-phosphorothioate
  modified_base 8: mod_base = OTHER; note = 2-fluororibose guanine
  modified_base 8..9: mod_base = OTHER; note = S-phosphorothioate
  modified_base 9: mod_base = OTHER; note = 2-fluororibose cytosine
  modified_base 10: mod_base = um
  modified_base 10..11: mod_base = OTHER; note = S-phosphorothioate
  modified_base 11: mod_base = OTHER; note = 2-fluororibose uracil
  modified_base 11..12: mod_base = OTHER; note R-N-(1,3-dimethylimidazolidin-2-ylidene)phosphoramidate
  modified_base 12: mod_base = cm
  modified_base 13: mod_base = OTHER; note = 2-fluororibose adenine
  modified_base 13..14: mod_base = OTHER; note = S-phosphorothioate
  modified_base 14: mod_base = OTHER; note = 2-fluororibose guanine
  modified_base 14..15: mod_base = OTHER; note R-N-(1,3-dimethylimidazolidin-2-ylidene)phosphoramidate
  modified_base 15: mod_base = OTHER; note = 2-fluororibose uracil
  modified_base 16: mod_base = cm
  modified_base 16..17: mod_base = OTHER; note = S-phosphorothioate
  modified_base 17: mod_base = OTHER; note = 2-fluororibose cytosine
  modified_base 17..18: mod_base = OTHER; note = S-phosphorothioate
  modified_base 18: mod_base = OTHER; note = 2-fluororibose cytosine
  modified_base 18..19: mod_base = OTHER; note = S-phosphorothioate
  modified_base 19: mod_base = OTHER; note = 2-fluororibose uracil
  modified_base 19..20: mod_base = OTHER; note = S-phosphorothioate
  modified_base 20: mod_base = um
  modified_base 21: mod_base = um
  modified_base 22: mod_base = OTHER; note = 2-fluororibose cytosine
  modified_base 22..23: mod_base = OTHER; note = S-phosphorothioate
  modified_base 23: mod_base = OTHER; note = deoxyribose thymine
  modified_base 23..24: mod_base = OTHER; note = S-phosphorothioate
  modified_base 24: mod_base = OTHER; note = deoxyribose uracil (position 3 connectivity)
  modified_base 24..25: mod_base = OTHER; note = S-phosphorothioate
  modified_base 25: mod_base = OTHER; note = deoxyribose inosine
  modified_base 25..26: mod_base = OTHER; note S-N-(1,3-dimethylimidazolidin-2-ylidene)phosphoramidate
  modified_base 26: mod_base = um
  modified_base 27: mod_base = OTHER; note = 2-fluororibose cytosine
  modified_base 27..28: mod_base = OTHER; note = S-phosphorothioate
  modified_base 28: mod_base = OTHER; note = 2-O-methoxyethylribose guanine
  modified_base 28..29: mod_base = OTHER; note = S-phosphorothioate
  modified_base 29: mod_base = OTHER; note = 2-O-methoxyethylribose adenine
  modified_base 29..30: mod_base = OTHER; note R-N-(1,3-dimethylimidazolidin-2-ylidene)phosphoramidate
  modified_base 30: mod_base = OTHER; note = 2-O-methoxyethylribose thymine
  source 1..30: mol_type = other RNA

SEQ ID NO: 782 - RNA, 30 nt, synthetic construct; identical to SEQ ID NO: 273
  misc_feature 1..30: note = Synthetic: WV-46440
  misc_feature 1..30: note = Synthetic: ADR-0103962
  modified_base 1: mod_base = OTHER; note = 2-O-methoxyethylribose 5-methyl-cytidine
  modified_base 1..2: mod_base = OTHER; note R-N-(1,3-dimethylimidazolidin-2-ylidene)phosphoramidate
  modified_base 2: mod_base = OTHER; note = 2-O-methoxyethylribose 5-methyl-cytidine
  modified_base 2..3: mod_base = OTHER; note = S-phosphorothioate
  modified_base 3: mod_base = OTHER; note = 2-O-methoxyethylribose 5-methyl-cytidine
  modified_base 3..4: mod_base = OTHER; note = S-phosphorothioate
  modified_base 4: mod_base = OTHER; note = 2-fluororibose adenine
  modified_base 4..5: mod_base = OTHER; note = S-phosphorothioate
  modified_base 5: mod_base = OTHER; note = 2-fluororibose guanine
  modified_base 5..6: mod_base = OTHER; note = S-phosphorothioate
  modified_base 6: mod_base = cm
  modified_base 7: mod_base = OTHER; note = 2-O-methylribose adenine
  modified_base 7..8: mod_base = OTHER; note = S-phosphorothioate
  modified_base 8: mod_base = OTHER; note = 2-fluororibose guanine
  modified_base 8..9: mod_base = OTHER; note = S-phosphorothioate
  modified_base 9: mod_base = OTHER; note = 2-fluororibose cytosine
  modified_base 10: mod_base = um
  modified_base 10..11: mod_base = OTHER; note = S-phosphorothioate
  modified_base 11: mod_base = OTHER; note = 2-fluororibose uracil
  modified_base 11..12: mod_base = OTHER; note R-N-(1,3-dimethylimidazolidin-2-ylidene)phosphoramidate
  modified_base 12: mod_base = cm
  modified_base 13: mod_base = OTHER; note = 2-fluororibose adenine
  modified_base 13..14: mod_base = OTHER; note = S-phosphorothioate
  modified_base 14: mod_base = OTHER; note = 2-fluororibose guanine
  modified_base 14..15: mod_base = OTHER; note R-N-(1,3-dimethylimidazolidin-2-ylidene)phosphoramidate
  modified_base 15: mod_base = OTHER; note = 2-fluororibose uracil
  modified_base 16: mod_base = cm
  modified_base 16..17: mod_base = OTHER; note = S-phosphorothioate
  modified_base 17: mod_base = OTHER; note = 2-fluororibose cytosine
  modified_base 17..18: mod_base = OTHER; note = S-phosphorothioate
  modified_base 18: mod_base = OTHER; note = 2-fluororibose cytosine
  modified_base 18..19: mod_base = OTHER; note = S-phosphorothioate
  modified_base 19: mod_base = OTHER; note = 2-fluororibose uracil
  modified_base 19..20: mod_base = OTHER; note = S-phosphorothioate
  modified_base 20: mod_base = um
  modified_base 21: mod_base = um
  modified_base 22: mod_base = OTHER; note = 2-fluororibose cytosine
  modified_base 22..23: mod_base = OTHER; note = S-phosphorothioate
  modified_base 23: mod_base = OTHER; note = deoxyribose thymine
  modified_base 23..24: mod_base = OTHER; note = S-phosphorothioate
  modified_base 24: mod_base = OTHER; note = deoxyribose uracil (position 3 connectivity)
  modified_base 24..25: mod_base = OTHER; note = S-phosphorothioate
  modified_base 25: mod_base = OTHER; note = deoxyribose inosine
  modified_base 25..26: mod_base = OTHER; note S-N-(1,3-dimethylimidazolidin-2-ylidene)phosphoramidate
  modified_base 26: mod_base = um
  modified_base 27: mod_base = OTHER; note = 2-fluororibose cytosine
  modified_base 27..28: mod_base = OTHER; note = S-phosphorothioate
  modified_base 28: mod_base = gm
  modified_base 28..29: mod_base = OTHER; note = S-phosphorothioate
  modified_base 29: mod_base = OTHER; note = 2-O-methylribose adenine
  modified_base 29..30: mod_base = OTHER; note R-N-(1,3-dimethylimidazolidin-2-ylidene)phosphoramidate
  modified_base 30: mod_base = OTHER; note = 2-O-methoxyethylribose thymine
  source 1..30: mol_type = other RNA

SEQ ID NO: 783 - RNA, 30 nt, synthetic construct; identical to SEQ ID NO: 273
  misc_feature 1..30: note = Synthetic: WV-46441
  misc_feature 1..30: note = Synthetic: ADR-0103961
  modified_base 1: mod_base = OTHER; note = 2-O-methoxyethylribose 5-methyl-cytidine
  modified_base 1..2: mod_base = OTHER; note R-N-(1,3-dimethylimidazolidin-2-ylidene)phosphoramidate
  modified_base 2: mod_base = OTHER; note = 2-O-methoxyethylribose 5-methyl-cytidine
  modified_base 2..3: mod_base = OTHER; note = S-phosphorothioate
  modified_base 3: mod_base = OTHER; note = 2-O-methoxyethylribose 5-methyl-cytidine
  modified_base 3..4: mod_base = OTHER; note = S-phosphorothioate
  modified_base 4: mod_base = OTHER; note = 2-fluororibose adenine
  modified_base 4..5: mod_base = OTHER; note = S-phosphorothioate
  modified_base 5: mod_base = OTHER; note = 2-fluororibose guanine
  modified_base 5..6: mod_base = OTHER; note = S-phosphorothioate
  modified_base 6: mod_base = cm
  modified_base 7: mod_base = OTHER; note = 2-O-methylribose adenine
  modified_base 7..8: mod_base = OTHER; note = S-phosphorothioate
  modified_base 8: mod_base = OTHER; note = 2-fluororibose guanine
  modified_base 8..9: mod_base = OTHER; note = S-phosphorothioate
  modified_base 9: mod_base = OTHER; note = 2-fluororibose cytosine
  modified_base 10: mod_base = um
  modified_base 10..11: mod_base = OTHER; note = S-phosphorothioate
  modified_base 11: mod_base = OTHER; note = 2-fluororibose uracil
  modified_base 11..12: mod_base = OTHER; note R-N-(1,3-dimethylimidazolidin-2-ylidene)phosphoramidate
  modified_base 12: mod_base = cm
  modified_base 13: mod_base = OTHER; note = 2-fluororibose adenine
  modified_base 13..14: mod_base = OTHER; note = S-phosphorothioate
  modified_base 14: mod_base = OTHER; note = 2-fluororibose guanine
  modified_base 14..15: mod_base = OTHER; note R-N-(1,3-dimethylimidazolidin-2-ylidene)phosphoramidate
  modified_base 15: mod_base = OTHER; note = 2-fluororibose uracil
  modified_base 16: mod_base = cm
  modified_base 16..17: mod_base = OTHER; note = S-phosphorothioate
  modified_base 17: mod_base = OTHER; note = 2-fluororibose cytosine
  modified_base 17..18: mod_base = OTHER; note = S-phosphorothioate
  modified_base 18: mod_base = OTHER; note = 2-fluororibose cytosine
  modified_base 18..19: mod_base = OTHER; note = S-phosphorothioate
  modified_base 19: mod_base = OTHER; note = 2-fluororibose uracil
  modified_base 19..20: mod_base = OTHER; note = S-phosphorothioate
  modified_base 20: mod_base = um
  modified_base 21: mod_base = um
  modified_base 22: mod_base = OTHER; note = 2-fluororibose cytosine
  modified_base 22..23: mod_base = OTHER; note = S-phosphorothioate
  modified_base 23: mod_base = OTHER; note = deoxyribose thymine
  modified_base 23..24: mod_base = OTHER; note = S-phosphorothioate
  modified_base 24: mod_base = OTHER; note = deoxyribose uracil (position 3 connectivity)
  modified_base 24..25: mod_base = OTHER; note = S-phosphorothioate
  modified_base 25: mod_base = OTHER; note = deoxyribose inosine
  modified_base 25..26: mod_base = OTHER; note S-N-(1,3-dimethylimidazolidin-2-ylidene)phosphoramidate
  modified_base 26: mod_base = um
  modified_base 27: mod_base = OTHER; note = 2-fluororibose cytosine
  modified_base 27..28: mod_base = OTHER; note = S-phosphorothioate
  modified_base 28: mod_base = gm
  modified_base 28..29: mod_base = OTHER; note = S-phosphorothioate
  modified_base 29: mod_base = OTHER; note = 2-O-methoxyethylribose adenine
  modified_base 29..30: mod_base = OTHER; note R-N-(1,3-dimethylimidazolidin-2-ylidene)phosphoramidate
  modified_base 30: mod_base = OTHER; note = 2-O-methoxyethylribose thymine
  source 1..30: mol_type = other RNA

SEQ ID NO: 784 - RNA, 30 nt, synthetic construct; identical to SEQ ID NO: 273
  misc_feature 1..30: note = Synthetic: WV-46442
  misc_feature 1..30: note = Synthetic: ADR-0103960
  modified_base 1: mod_base = OTHER; note = 2-O-methoxyethylribose 5-methyl-cytidine
  modified_base 1..2: mod_base = OTHER; note R-N-(1,3-dimethylimidazolidin-2-ylidene)phosphoramidate
  modified_base 2: mod_base = OTHER; note = 2-O-methoxyethylribose 5-methyl-cytidine
  modified_base 2..3: mod_base = OTHER; note = S-phosphorothioate
  modified_base 3: mod_base = OTHER; note = 2-O-methoxyethylribose 5-methyl-cytidine
  modified_base 3..4: mod_base = OTHER; note = S-phosphorothioate
  modified_base 4: mod_base = OTHER; note = 2-fluororibose adenine
  modified_base 4..5: mod_base = OTHER; note = S-phosphorothioate
  modified_base 5: mod_base = OTHER; note = 2-fluororibose guanine
  modified_base 5..6: mod_base = OTHER; note = S-phosphorothioate
  modified_base 6: mod_base = cm
  modified_base 7: mod_base = OTHER; note = 2-O-methylribose adenine
  modified_base 7..8: mod_base = OTHER; note = S-phosphorothioate
  modified_base 8: mod_base = OTHER; note = 2-fluororibose guanine
  modified_base 8..9: mod_base = OTHER; note = S-phosphorothioate
  modified_base 9: mod_base = OTHER; note = 2-fluororibose cytosine
  modified_base 10: mod_base = um
  modified_base 10..11: mod_base = OTHER; note = S-phosphorothioate
  modified_base 11: mod_base = OTHER; note = 2-fluororibose uracil
  modified_base 11..12: mod_base = OTHER; note R-N-(1,3-dimethylimidazolidin-2-ylidene)phosphoramidate
  modified_base 12: mod_base = cm
  modified_base 13: mod_base = OTHER; note = 2-fluororibose adenine
  modified_base 13..14: mod_base = OTHER; note = S-phosphorothioate
  modified_base 14: mod_base = OTHER; note = 2-fluororibose guanine
  modified_base 14..15: mod_base = OTHER; note R-N-(1,3-dimethylimidazolidin-2-ylidene)phosphoramidate
  modified_base 15: mod_base = OTHER; note = 2-fluororibose uracil
  modified_base 16: mod_base = cm
  modified_base 16..17: mod_base = OTHER; note = S-phosphorothioate
  modified_base 17: mod_base = OTHER; note = 2-fluororibose cytosine
  modified_base 17..18: mod_base = OTHER; note = S-phosphorothioate
  modified_base 18: mod_base = OTHER; note = 2-fluororibose cytosine
  modified_base 18..19: mod_base = OTHER; note = S-phosphorothioate
  modified_base 19: mod_base = OTHER; note = 2-fluororibose uracil
  modified_base 19..20: mod_base = OTHER; note = S-phosphorothioate
  modified_base 20: mod_base = um
  modified_base 21: mod_base = um
  modified_base 22: mod_base = OTHER; note = 2-fluororibose cytosine
  modified_base 22..23: mod_base = OTHER; note = S-phosphorothioate
  modified_base 23: mod_base = OTHER; note = deoxyribose thymine
  modified_base 23..24: mod_base = OTHER; note = S-phosphorothioate
  modified_base 24: mod_base = OTHER; note = deoxyribose uracil (position 3 connectivity)
  modified_base 24..25: mod_base = OTHER; note = S-phosphorothioate
  modified_base 25: mod_base = OTHER; note = deoxyribose inosine
  modified_base 25..26: mod_base = OTHER; note S-N-(1,3-dimethylimidazolidin-2-ylidene)phosphoramidate
  modified_base 26: mod_base = um
  modified_base 27: mod_base = OTHER; note = 2-fluororibose cytosine
  modified_base 27..28: mod_base = OTHER; note = S-phosphorothioate
  modified_base 28: mod_base = OTHER; note = 2-O-methoxyethylribose guanine
  modified_base 28..29: mod_base = OTHER; note = S-phosphorothioate
  modified_base 29: mod_base = OTHER; note = 2-O-methoxyethylribose adenine
  modified_base 29..30: mod_base = OTHER; note R-N-(1,3-dimethylimidazolidin-2-ylidene)phosphoramidate
  modified_base 30: mod_base = OTHER; note = 2-O-methoxyethylribose thymine
  source 1..30: mol_type = other RNA

SEQ ID NO: 785 - RNA, 30 nt, synthetic construct; identical to SEQ ID NO: 273
  misc_feature 1..30: note = Synthetic: WV-46443
  misc_feature 1..30: note = Synthetic: ADR-0104100
  modified_base 1: mod_base = cm
  modified_base 1..2: mod_base = OTHER; note R-N-(1,3-dimethylimidazolidin-2-ylidene)phosphoramidate
  modified_base 2: mod_base = cm
  modified_base 2..3: mod_base = OTHER; note = S-phosphorothioate
  modified_base 3: mod_base = cm
  modified_base 3..4: mod_base = OTHER; note = S-phosphorothioate
  modified_base 4: mod_base = OTHER; note = 2-fluororibose adenine
  modified_base 4..5: mod_base = OTHER; note = S-phosphorothioate
  modified_base 5: mod_base = OTHER; note = 2-fluororibose guanine
  modified_base 5..6: mod_base = OTHER; note = S-phosphorothioate
  modified_base 6: mod_base = OTHER; note = 2-O-methoxyethylribose 5-methyl-cytidine
  modified_base 7: mod_base = OTHER; note = 2-O-methylribose adenine
  modified_base 7..8: mod_base = OTHER; note = S-phosphorothioate
  modified_base 8: mod_base = OTHER; note = 2-fluororibose guanine
  modified_base 8..9: mod_base = OTHER; note = S-phosphorothioate
  modified_base 9: mod_base = OTHER; note = 2-fluororibose cytosine
  modified_base 10: mod_base = um
  modified_base 10..11: mod_base = OTHER; note = S-phosphorothioate
  modified_base 11: mod_base = OTHER; note = 2-fluororibose uracil
  modified_base 11..12: mod_base = OTHER; note R-N-(1,3-dimethylimidazolidin-2-ylidene)phosphoramidate
  modified_base 12: mod_base = cm
  modified_base 13: mod_base = OTHER; note = 2-fluororibose adenine
  modified_base 13..14: mod_base = OTHER; note = S-phosphorothioate
  modified_base 14: mod_base = OTHER; note = 2-fluororibose guanine
  modified_base 14..15: mod_base = OTHER; note R-N-(1,3-dimethylimidazolidin-2-ylidene)phosphoramidate
  modified_base 15: mod_base = OTHER; note = 2-fluororibose uracil
  modified_base 16: mod_base = cm
  modified_base 16..17: mod_base = OTHER; note = S-phosphorothioate
  modified_base 17: mod_base = OTHER; note = 2-fluororibose cytosine
  modified_base 17..18: mod_base = OTHER; note = S-phosphorothioate
  modified_base 18: mod_base = OTHER; note = 2-fluororibose cytosine
  modified_base 18..19: mod_base = OTHER; note = S-phosphorothioate
  modified_base 19: mod_base = OTHER; note = 2-fluororibose uracil
  modified_base 19..20: mod_base = OTHER; note = S-phosphorothioate
  modified_base 20: mod_base = um
  modified_base 21: mod_base = um
  modified_base 22: mod_base = OTHER; note = 2-fluororibose cytosine
  modified_base 22..23: mod_base = OTHER; note = S-phosphorothioate
  modified_base 23: mod_base = OTHER; note = deoxyribose thymine
  modified_base 23..24: mod_base = OTHER; note = S-phosphorothioate
  modified_base 24: mod_base = OTHER; note = deoxyribose uracil (position 3 connectivity)
  modified_base 24..25: mod_base = OTHER; note = S-phosphorothioate
  modified_base 25: mod_base = OTHER; note = deoxyribose inosine
  modified_base 25..26: mod_base = OTHER; note S-N-(1,3-dimethylimidazolidin-2-ylidene)phosphoramidate
  modified_base 26: mod_base = um
  modified_base 27: mod_base = OTHER; note = 2-fluororibose cytosine
  modified_base 27..28: mod_base = OTHER; note = S-phosphorothioate
  modified_base 28: mod_base = gm
  modified_base 28..29: mod_base = OTHER; note = S-phosphorothioate
  modified_base 29: mod_base = OTHER; note = 2-O-methylribose adenine
  modified_base 29..30: mod_base = OTHER; note R-N-(1,3-dimethylimidazolidin-2-ylidene)phosphoramidate
  modified_base 30: mod_base = um
  source 1..30: mol_type = other RNA

SEQ ID NO: 786 - RNA, 30 nt, synthetic construct; identical to SEQ ID NO: 273
  misc_feature 1..30: note = Synthetic: WV-46444
  misc_feature 1..30: note = Synthetic: ADR-0104116
  modified_base 1: mod_base = cm
  modified_base 1..2: mod_base = OTHER; note R-N-(1,3-dimethylimidazolidin-2-ylidene)phosphoramidate
  modified_base 2: mod_base = cm
  modified_base 2..3: mod_base = OTHER; note = S-phosphorothioate
  modified_base 3: mod_base = cm
  modified_base 3..4: mod_base = OTHER; note = S-phosphorothioate
  modified_base 4: mod_base = OTHER; note = 2-fluororibose adenine
  modified_base 4..5: mod_base = OTHER; note = S-phosphorothioate
  modified_base 5: mod_base = OTHER; note = 2-fluororibose guanine
  modified_base 5..6: mod_base = OTHER; note = S-phosphorothioate
  modified_base 6: mod_base = cm
  modified_base 7: mod_base = OTHER; note = 2-O-methoxyethylribose adenine
  modified_base 7..8: mod_base = OTHER; note = S-phosphorothioate
  modified_base 8: mod_base = OTHER; note = 2-fluororibose guanine
  modified_base 8..9: mod_base = OTHER; note = S-phosphorothioate
  modified_base 9: mod_base = OTHER; note = 2-fluororibose cytosine
  modified_base 10: mod_base = um
  modified_base 10..11: mod_base = OTHER; note = S-phosphorothioate
  modified_base 11: mod_base = OTHER; note = 2-fluororibose uracil
  modified_base 11..12: mod_base = OTHER; note R-N-(1,3-dimethylimidazolidin-2-ylidene)phosphoramidate
  modified_base 12: mod_base = cm
  modified_base 13: mod_base = OTHER; note = 2-fluororibose adenine
  modified_base 13..14: mod_base = OTHER; note = S-phosphorothioate
  modified_base 14: mod_base = OTHER; note = 2-fluororibose guanine
  modified_base 14..15: mod_base = OTHER; note R-N-(1,3-dimethylimidazolidin-2-ylidene)phosphoramidate
  modified_base 15: mod_base = OTHER; note = 2-fluororibose uracil
  modified_base 16: mod_base = cm
  modified_base 16..17: mod_base = OTHER; note = S-phosphorothioate
  modified_base 17: mod_base = OTHER; note = 2-fluororibose cytosine
  modified_base 17..18: mod_base = OTHER; note = S-phosphorothioate
  modified_base 18: mod_base = OTHER; note = 2-fluororibose cytosine
  modified_base 18..19: mod_base = OTHER; note = S-phosphorothioate
  modified_base 19: mod_base = OTHER; note = 2-fluororibose uracil
  modified_base 19..20: mod_base = OTHER; note = S-phosphorothioate
  modified_base 20: mod_base = um
  modified_base 21: mod_base = um
  modified_base 22: mod_base = OTHER; note = 2-fluororibose cytosine
  modified_base 22..23: mod_base = OTHER; note = S-phosphorothioate
  modified_base 23: mod_base = OTHER; note = deoxyribose thymine
  modified_base 23..24: mod_base = OTHER; note = S-phosphorothioate
  modified_base 24: mod_base = OTHER; note = deoxyribose uracil (position 3 connectivity)
  modified_base 24..25: mod_base = OTHER; note = S-phosphorothioate
  modified_base 25: mod_base = OTHER; note = deoxyribose inosine
  modified_base 25..26: mod_base = OTHER; note S-N-(1,3-dimethylimidazolidin-2-ylidene)phosphoramidate
  modified_base 26: mod_base = um
  modified_base 27: mod_base = OTHER; note = 2-fluororibose cytosine
  modified_base 27..28: mod_base = OTHER; note = S-phosphorothioate
  modified_base 28: mod_base = gm
  modified_base 28..29: mod_base = OTHER; note = S-phosphorothioate
  modified_base 29: mod_base = OTHER; note = 2-O-methylribose adenine
  modified_base 29..30: mod_base = OTHER; note R-N-(1,3-dimethylimidazolidin-2-ylidene)phosphoramidate
  modified_base 30: mod_base = um
  source 1..30: mol_type = other RNA

SEQ ID NO: 787 - RNA, 30 nt, synthetic construct; identical to SEQ ID NO: 273
  misc_feature 1..30: note = Synthetic: WV-46445
  misc_feature 1..30: note = Synthetic: ADR-0104118
  modified_base 1: mod_base = cm
  modified_base 1..2: mod_base = OTHER; note R-N-(1,3-dimethylimidazolidin-2-ylidene)phosphoramidate
  modified_base 2: mod_base = cm
  modified_base 2..3: mod_base = OTHER; note = S-phosphorothioate
  modified_base 3: mod_base = cm
  modified_base 3..4: mod_base = OTHER; note = S-phosphorothioate
  modified_base 4: mod_base = OTHER; note = 2-fluororibose adenine
  modified_base 4..5: mod_base = OTHER; note = S-phosphorothioate
  modified_base 5: mod_base = OTHER; note = 2-fluororibose guanine
  modified_base 5..6: mod_base = OTHER; note = S-phosphorothioate
  modified_base 6: mod_base = cm
  modified_base 7: mod_base = OTHER; note = 2-O-methylribose adenine
  modified_base 7..8: mod_base = OTHER; note = S-phosphorothioate
  modified_base 8: mod_base = OTHER; note = 2-fluororibose guanine
  modified_base 8..9: mod_base = OTHER; note = S-phosphorothioate
  modified_base 9: mod_base = OTHER; note = 2-fluororibose cytosine
  modified_base 10: mod_base = OTHER; note = 2-O-methoxyethylribose thymine
  modified_base 10..11: mod_base = OTHER; note = S-phosphorothioate
  modified_base 11: mod_base = OTHER; note = 2-fluororibose uracil
  modified_base 11..12: mod_base = OTHER; note R-N-(1,3-dimethylimidazolidin-2-ylidene)phosphoramidate
  modified_base 12: mod_base = cm
  modified_base 13: mod_base = OTHER; note = 2-fluororibose adenine
  modified_base 13..14: mod_base = OTHER; note = S-phosphorothioate
  modified_base 14: mod_base = OTHER; note = 2-fluororibose guanine
  modified_base 14..15: mod_base = OTHER; note R-N-(1,3-dimethylimidazolidin-2-ylidene)phosphoramidate
  modified_base 15: mod_base = OTHER; note = 2-fluororibose uracil
  modified_base 16: mod_base = cm
  modified_base 16..17: mod_base = OTHER; note = S-phosphorothioate
  modified_base 17: mod_base = OTHER; note = 2-fluororibose cytosine
  modified_base 17..18: mod_base = OTHER; note = S-phosphorothioate
  modified_base 18: mod_base = OTHER; note = 2-fluororibose cytosine
  modified_base 18..19: mod_base = OTHER; note = S-phosphorothioate
  modified_base 19: mod_base = OTHER; note = 2-fluororibose uracil
  modified_base 19..20: mod_base = OTHER; note = S-phosphorothioate
  modified_base 20: mod_base = um
  modified_base 21: mod_base = um
  modified_base 22: mod_base = OTHER; note = 2-fluororibose cytosine
  modified_base 22..23: mod_base = OTHER; note = S-phosphorothioate
  modified_base 23: mod_base = OTHER; note = deoxyribose thymine
  modified_base 23..24: mod_base = OTHER; note = S-phosphorothioate
  modified_base 24: mod_base = OTHER; note = deoxyribose uracil (position 3 connectivity)
  modified_base 24..25: mod_base = OTHER; note = S-phosphorothioate
  modified_base 25: mod_base = OTHER; note = deoxyribose inosine
  modified_base 25..26: mod_base = OTHER; note S-N-(1,3-dimethylimidazolidin-2-ylidene)phosphoramidate
  modified_base 26: mod_base = um
  modified_base 27: mod_base = OTHER; note = 2-fluororibose cytosine
  modified_base 27..28: mod_base = OTHER; note = S-phosphorothioate
  modified_base 28: mod_base = gm
  modified_base 28..29: mod_base = OTHER; note = S-phosphorothioate
  modified_base 29: mod_base = OTHER; note = 2-O-methylribose adenine
  modified_base 29..30: mod_base = OTHER; note R-N-(1,3-dimethylimidazolidin-2-ylidene)phosphoramidate
  modified_base 30: mod_base = um
  source 1..30: mol_type = other RNA

SEQ ID NO: 788 - RNA, 30 nt, synthetic construct; identical to SEQ ID NO: 273
  misc_feature 1..30: note = Synthetic: WV-46446
  misc_feature 1..30: note = Synthetic: ADR-0104119
  modified_base 1: mod_base = cm
  modified_base 1..2: mod_base = OTHER; note R-N-(1,3-dimethylimidazolidin-2-ylidene)phosphoramidate
  modified_base 2: mod_base = cm
  modified_base 2..3: mod_base = OTHER; note = S-phosphorothioate
  modified_base 3: mod_base = cm
  modified_base 3..4: mod_base = OTHER; note = S-phosphorothioate
  modified_base 4: mod_base = OTHER; note = 2-fluororibose adenine
  modified_base 4..5: mod_base = OTHER; note = S-phosphorothioate
  modified_base 5: mod_base = OTHER; note = 2-fluororibose guanine
  modified_base 5..6: mod_base = OTHER; note = S-phosphorothioate
  modified_base 6: mod_base = cm
  modified_base 7: mod_base = OTHER; note = 2-O-methylribose adenine
  modified_base 7..8: mod_base = OTHER; note = S-phosphorothioate
  modified_base 8: mod_base = OTHER; note = 2-fluororibose guanine
  modified_base 8..9: mod_base = OTHER; note = S-phosphorothioate
  modified_base 9: mod_base = OTHER; note = 2-fluororibose cytosine
  modified_base 10: mod_base = um
  modified_base 10..11: mod_base = OTHER; note = S-phosphorothioate
  modified_base 11: mod_base = OTHER; note = 2-fluororibose uracil
  modified_base 11..12: mod_base = OTHER; note R-N-(1,3-dimethylimidazolidin-2-ylidene)phosphoramidate
  modified_base 12: mod_base = OTHER; note = 2-O-methoxyethylribose 5-methyl-cytidine
  modified_base 13: mod_base = OTHER; note = 2-fluororibose adenine
  modified_base 13..14: mod_base = OTHER; note = S-phosphorothioate
  modified_base 14: mod_base = OTHER; note = 2-fluororibose guanine
  modified_base 14..15: mod_base = OTHER; note R-N-(1,3-dimethylimidazolidin-2-ylidene)phosphoramidate
  modified_base 15: mod_base = OTHER; note = 2-fluororibose uracil
  modified_base 16: mod_base = cm
  modified_base 16..17: mod_base = OTHER; note = S-phosphorothioate
  modified_base 17: mod_base = OTHER; note = 2-fluororibose cytosine
  modified_base 17..18: mod_base = OTHER; note = S-phosphorothioate
  modified_base 18: mod_base = OTHER; note = 2-fluororibose cytosine
  modified_base 18..19: mod_base = OTHER; note = S-phosphorothioate
  modified_base 19: mod_base = OTHER; note = 2-fluororibose uracil
  modified_base 19..20: mod_base = OTHER; note = S-phosphorothioate
  modified_base 20: mod_base = um
  modified_base 21: mod_base = um
  modified_base 22: mod_base = OTHER; note = 2-fluororibose cytosine
  modified_base 22..23: mod_base = OTHER; note = S-phosphorothioate
  modified_base 23: mod_base = OTHER; note = deoxyribose thymine
  modified_base 23..24: mod_base = OTHER; note = S-phosphorothioate
  modified_base 24: mod_base = OTHER; note = deoxyribose uracil (position 3 connectivity)
  modified_base 24..25: mod_base = OTHER; note = S-phosphorothioate
  modified_base 25: mod_base = OTHER; note = deoxyribose inosine
  modified_base 25..26: mod_base = OTHER; note S-N-(1,3-dimethylimidazolidin-2-ylidene)phosphoramidate
  modified_base 26: mod_base = um
  modified_base 27: mod_base = OTHER; note = 2-fluororibose cytosine
  modified_base 27..28: mod_base = OTHER; note = S-phosphorothioate
  modified_base 28: mod_base = gm
  modified_base 28..29: mod_base = OTHER; note = S-phosphorothioate
  modified_base 29: mod_base = OTHER; note = 2-O-methylribose adenine
  modified_base 29..30: mod_base = OTHER; note R-N-(1,3-dimethylimidazolidin-2-ylidene)phosphoramidate
  modified_base 30: mod_base = um
  source 1..30: mol_type = other RNA

SEQ ID NO: 789 - RNA, 30 nt, synthetic construct; identical to SEQ ID NO: 273
  misc_feature 1..30: note = Synthetic: WV-46447
  misc_feature 1..30: note = Synthetic: ADR-0104120
  modified_base 1: mod_base = cm
  modified_base 1..2: mod_base = OTHER; note R-N-(1,3-dimethylimidazolidin-2-ylidene)phosphoramidate
  modified_base 2: mod_base = cm
  modified_base 2..3: mod_base = OTHER; note = S-phosphorothioate
  modified_base 3: mod_base = cm
  modified_base 3..4: mod_base = OTHER; note = S-phosphorothioate
  modified_base 4: mod_base = OTHER; note = 2-fluororibose adenine
  modified_base 4..5: mod_base = OTHER; note = S-phosphorothioate
  modified_base 5: mod_base = OTHER; note = 2-fluororibose guanine
  modified_base 5..6: mod_base = OTHER; note = S-phosphorothioate
  modified_base 6: mod_base = cm
  modified_base 7: mod_base = OTHER; note = 2-O-methylribose adenine
  modified_base 7..8: mod_base = OTHER; note = S-phosphorothioate
  modified_base 8: mod_base = OTHER; note = 2-fluororibose guanine
  modified_base 8..9: mod_base = OTHER; note = S-phosphorothioate
  modified_base 9: mod_base = OTHER; note = 2-fluororibose cytosine
  modified_base 10: mod_base = um
  modified_base 10..11: mod_base = OTHER; note = S-phosphorothioate
  modified_base 11: mod_base = OTHER; note = 2-fluororibose uracil
  modified_base 11..12: mod_base = OTHER; note R-N-(1,3-dimethylimidazolidin-2-ylidene)phosphoramidate
  modified_base 12: mod_base = cm
  modified_base 13: mod_base = OTHER; note = 2-fluororibose adenine
  modified_base 13..14: mod_base = OTHER; note = S-phosphorothioate
  modified_base 14: mod_base = OTHER; note = 2-fluororibose guanine
  modified_base 14..15: mod_base = OTHER; note R-N-(1,3-dimethylimidazolidin-2-ylidene)phosphoramidate
  modified_base 15: mod_base = OTHER; note = 2-fluororibose uracil
  modified_base 16: mod_base = OTHER; note = 2-O-methoxyethylribose 5-methyl-cytidine
  modified_base 16..17: mod_base = OTHER; note = S-phosphorothioate
  modified_base 17: mod_base = OTHER; note = 2-fluororibose cytosine
  modified_base 17..18: mod_base = OTHER; note = S-phosphorothioate
  modified_base 18: mod_base = OTHER; note = 2-fluororibose cytosine
  modified_base 18..19: mod_base = OTHER; note = S-phosphorothioate
  modified_base 19: mod_base = OTHER; note = 2-fluororibose uracil
  modified_base 19..20: mod_base = OTHER; note = S-phosphorothioate
  modified_base 20: mod_base = um
  modified_base 21: mod_base = um
  modified_base 22: mod_base = OTHER; note = 2-fluororibose cytosine
  modified_base 22..23: mod_base = OTHER; note = S-phosphorothioate
  modified_base 23: mod_base = OTHER; note = deoxyribose thymine
  modified_base 23..24: mod_base = OTHER; note = S-phosphorothioate
  modified_base 24: mod_base = OTHER; note = deoxyribose uracil (position 3 connectivity)
  modified_base 24..25: mod_base = OTHER; note = S-phosphorothioate
  modified_base 25: mod_base = OTHER; note = deoxyribose inosine
  modified_base 25..26: mod_base = OTHER; note S-N-(1,3-dimethylimidazolidin-2-ylidene)phosphoramidate
  modified_base 26: mod_base = um
  modified_base 27: mod_base = OTHER; note = 2-fluororibose cytosine
  modified_base 27..28: mod_base = OTHER; note = S-phosphorothioate
  modified_base 28: mod_base = gm
  modified_base 28..29: mod_base = OTHER; note = S-phosphorothioate
  modified_base 29: mod_base = OTHER; note = 2-O-methylribose adenine
  modified_base 29..30: mod_base = OTHER; note R-N-(1,3-dimethylimidazolidin-2-ylidene)phosphoramidate
  modified_base 30: mod_base = um
  source 1..30: mol_type = other RNA

SEQ ID NO: 790 - RNA, 30 nt, synthetic construct; identical to SEQ ID NO: 273
  misc_feature 1..30: note = Synthetic: WV-46448
  misc_feature 1..30: note = Synthetic: ADR-0104121
  modified_base 1: mod_base = cm
  modified_base 1..2: mod_base = OTHER; note R-N-(1,3-dimethylimidazolidin-2-ylidene)phosphoramidate
  modified_base 2: mod_base = cm
  modified_base 2..3: mod_base = OTHER; note = S-phosphorothioate
  modified_base 3: mod_base = cm
  modified_base 3..4: mod_base = OTHER; note = S-phosphorothioate
  modified_base 4: mod_base = OTHER; note = 2-fluororibose adenine
  modified_base 4..5: mod_base = OTHER; note = S-phosphorothioate
  modified_base 5: mod_base = OTHER; note = 2-fluororibose guanine
  modified_base 5..6: mod_base = OTHER; note = S-phosphorothioate
  modified_base 6: mod_base = cm
  modified_base 7: mod_base = OTHER; note = 2-O-methylribose adenine
  modified_base 7..8: mod_base = OTHER; note = S-phosphorothioate
  modified_base 8: mod_base = OTHER; note = 2-fluororibose guanine
  modified_base 8..9: mod_base = OTHER; note = S-phosphorothioate
  modified_base 9: mod_base = OTHER; note = 2-fluororibose cytosine
  modified_base 10: mod_base = um
  modified_base 10..11: mod_base = OTHER; note = S-phosphorothioate
  modified_base 11: mod_base = OTHER; note = 2-fluororibose uracil
  modified_base 11..12: mod_base = OTHER; note R-N-(1,3-dimethylimidazolidin-2-ylidene)phosphoramidate
  modified_base 12: mod_base = cm
  modified_base 13: mod_base = OTHER; note = 2-fluororibose adenine
  modified_base 13..14: mod_base = OTHER; note = S-phosphorothioate
  modified_base 14: mod_base = OTHER; note = 2-fluororibose guanine
  modified_base 14..15: mod_base = OTHER; note R-N-(1,3-dimethylimidazolidin-2-ylidene)phosphoramidate
  modified_base 15: mod_base = OTHER; note = 2-fluororibose uracil
  modified_base 16: mod_base = cm
  modified_base 16..17: mod_base = OTHER; note = S-phosphorothioate
  modified_base 17: mod_base = OTHER; note = 2-fluororibose cytosine
  modified_base 17..18: mod_base = OTHER; note = S-phosphorothioate
  modified_base 18: mod_base = OTHER; note = 2-fluororibose cytosine
  modified_base 18..19: mod_base = OTHER; note = S-phosphorothioate
  modified_base 19: mod_base = OTHER; note = 2-fluororibose uracil
  modified_base 19..20: mod_base = OTHER; note = S-phosphorothioate
  modified_base 20: mod_base = OTHER; note = 2-O-methoxyethylribose thymine
  modified_base 21: mod_base = um
  modified_base 22: mod_base = OTHER; note = 2-fluororibose cytosine
  modified_base 22..23: mod_base = OTHER; note = S-phosphorothioate
  modified_base 23: mod_base = OTHER; note = deoxyribose thymine
  modified_base 23..24: mod_base = OTHER; note = S-phosphorothioate
  modified_base 24: mod_base = OTHER; note = deoxyribose uracil (position 3 connectivity)
  modified_base 24..25: mod_base = OTHER; note = S-phosphorothioate
  modified_base 25: mod_base = OTHER; note = deoxyribose inosine
  modified_base 25..26: mod_base = OTHER; note S-N-(1,3-dimethylimidazolidin-2-ylidene)phosphoramidate
  modified_base 26: mod_base = um
  modified_base 27: mod_base = OTHER; note = 2-fluororibose cytosine
  modified_base 27..28: mod_base = OTHER; note = S-phosphorothioate
  modified_base 28: mod_base = gm
  modified_base 28..29: mod_base = OTHER; note = S-phosphorothioate
  modified_base 29: mod_base = OTHER; note = 2-O-methylribose adenine
  modified_base 29..30: mod_base = OTHER; note R-N-(1,3-dimethylimidazolidin-2-ylidene)phosphoramidate
  modified_base 30: mod_base = um
  source 1..30: mol_type = other RNA

SEQ ID NO: 791 - RNA, 30 nt, synthetic construct; identical to SEQ ID NO: 273
  misc_feature 1..30: note = Synthetic: WV-46449
  misc_feature 1..30: note = Synthetic: ADR-0104122
  modified_base 1: mod_base = cm
  modified_base 1..2: mod_base = OTHER; note R-N-(1,3-dimethylimidazolidin-2-ylidene)phosphoramidate
  modified_base 2: mod_base = cm
  modified_base 2..3: mod_base = OTHER; note = S-phosphorothioate
  modified_base 3: mod_base = cm
  modified_base 3..4: mod_base = OTHER; note = S-phosphorothioate
  modified_base 4: mod_base = OTHER; note = 2-fluororibose adenine
  modified_base 4..5: mod_base = OTHER; note = S-phosphorothioate
  modified_base 5: mod_base = OTHER; note = 2-fluororibose guanine
  modified_base 5..6: mod_base = OTHER; note = S-phosphorothioate
  modified_base 6: mod_base = cm
  modified_base 7: mod_base = OTHER; note = 2-O-methylribose adenine
  modified_base 7..8: mod_base = OTHER; note = S-phosphorothioate
  modified_base 8: mod_base = OTHER; note = 2-fluororibose guanine
  modified_base 8..9: mod_base = OTHER; note = S-phosphorothioate
  modified_base 9: mod_base = OTHER; note = 2-fluororibose cytosine
  modified_base 10: mod_base = um
  modified_base 10..11: mod_base = OTHER; note = S-phosphorothioate
  modified_base 11: mod_base = OTHER; note = 2-fluororibose uracil
  modified_base 11..12: mod_base = OTHER; note R-N-(1,3-dimethylimidazolidin-2-ylidene)phosphoramidate
  modified_base 12: mod_base = cm
  modified_base 13: mod_base = OTHER; note = 2-fluororibose adenine
  modified_base 13..14: mod_base = OTHER; note = S-phosphorothioate
  modified_base 14: mod_base = OTHER; note = 2-fluororibose guanine
  modified_base 14..15: mod_base = OTHER; note R-N-(1,3-dimethylimidazolidin-2-ylidene)phosphoramidate
  modified_base 15: mod_base = OTHER; note = 2-fluororibose uracil
  modified_base 16: mod_base = cm
  modified_base 16..17: mod_base = OTHER; note = S-phosphorothioate
  modified_base 17: mod_base = OTHER; note = 2-fluororibose cytosine
  modified_base 17..18: mod_base = OTHER; note = S-phosphorothioate
  modified_base 18: mod_base = OTHER; note = 2-fluororibose cytosine
  modified_base 18..19: mod_base = OTHER; note = S-phosphorothioate
  modified_base 19: mod_base = OTHER; note = 2-fluororibose uracil
  modified_base 19..20: mod_base = OTHER; note = S-phosphorothioate
  modified_base 20: mod_base = um
  modified_base 21: mod_base = OTHER; note = 2-O-methoxyethylribose thymine
  modified_base 22: mod_base = OTHER; note = 2-fluororibose cytosine
  modified_base 22..23: mod_base = OTHER; note = S-phosphorothioate
  modified_base 23: mod_base = OTHER; note = deoxyribose thymine
  modified_base 23..24: mod_base = OTHER; note = S-phosphorothioate
  modified_base 24: mod_base = OTHER; note = deoxyribose uracil (position 3 connectivity)
  modified_base 24..25: mod_base = OTHER; note = S-phosphorothioate
  modified_base 25: mod_base = OTHER; note = deoxyribose inosine
  modified_base 25..26: mod_base = OTHER; note S-N-(1,3-dimethylimidazolidin-2-ylidene)phosphoramidate
  modified_base 26: mod_base = um
  modified_base 27: mod_base = OTHER; note = 2-fluororibose cytosine
  modified_base 27..28: mod_base = OTHER; note = S-phosphorothioate
  modified_base 28: mod_base = gm
  modified_base 28..29: mod_base = OTHER; note = S-phosphorothioate
  modified_base 29: mod_base = OTHER; note = 2-O-methylribose adenine
  modified_base 29..30: mod_base = OTHER; note R-N-(1,3-dimethylimidazolidin-2-ylidene)phosphoramidate
  modified_base 30: mod_base = um
  source 1..30: mol_type = other RNA

SEQ ID NO: 792 - RNA, 30 nt, synthetic construct; identical to SEQ ID NO: 273
  misc_feature 1..30: note = Synthetic: WV-46450
  misc_feature 1..30: note = Synthetic: ADR-0104172
  modified_base 1: mod_base = cm
  modified_base 1..2: mod_base = OTHER; note R-N-(1,3-dimethylimidazolidin-2-ylidene)phosphoramidate
  modified_base 2: mod_base = cm
  modified_base 2..3: mod_base = OTHER; note = S-phosphorothioate
  modified_base 3: mod_base = cm
  modified_base 3..4: mod_base = OTHER; note = S-phosphorothioate
  modified_base 4: mod_base = OTHER; note = 2-fluororibose adenine
  modified_base 4..5: mod_base = OTHER; note = S-phosphorothioate
  modified_base 5: mod_base = OTHER; note = 2-fluororibose guanine
  modified_base 5..6: mod_base = OTHER; note = S-phosphorothioate
  modified_base 6: mod_base = cm
  modified_base 7: mod_base = OTHER; note = 2-O-methylribose adenine
  modified_base 7..8: mod_base = OTHER; note = S-phosphorothioate
  modified_base 8: mod_base = OTHER; note = 2-fluororibose guanine
  modified_base 8..9: mod_base = OTHER; note = S-phosphorothioate
  modified_base 9: mod_base = OTHER; note = 2-fluororibose cytosine
  modified_base 10: mod_base = um
  modified_base 10..11: mod_base = OTHER; note = S-phosphorothioate
  modified_base 11: mod_base = OTHER; note = 2-fluororibose uracil
  modified_base 11..12: mod_base = OTHER; note R-N-(1,3-dimethylimidazolidin-2-ylidene)phosphoramidate
  modified_base 12: mod_base = cm
  modified_base 13: mod_base = OTHER; note = 2-fluororibose adenine
  modified_base 13..14: mod_base = OTHER; note = S-phosphorothioate
  modified_base 14: mod_base = OTHER; note = 2-fluororibose guanine
  modified_base 14..15: mod_base = OTHER; note R-N-(1,3-dimethylimidazolidin-2-ylidene)phosphoramidate
  modified_base 15: mod_base = OTHER; note = 2-fluororibose uracil
  modified_base 16: mod_base = cm
  modified_base 16..17: mod_base = OTHER; note = S-phosphorothioate
  modified_base 17: mod_base = OTHER; note = 2-fluororibose cytosine
  modified_base 17..18: mod_base = OTHER; note = S-phosphorothioate
  modified_base 18: mod_base = OTHER; note = 2-fluororibose cytosine
  modified_base 18..19: mod_base = OTHER; note = S-phosphorothioate
  modified_base 19: mod_base = OTHER; note = 2-fluororibose uracil
  modified_base 19..20: mod_base = OTHER; note = S-phosphorothioate
  modified_base 20: mod_base = um
  modified_base 21: mod_base = um
  modified_base 22: mod_base = OTHER; note = 2-fluororibose cytosine
  modified_base 22..23: mod_base = OTHER; note = S-phosphorothioate
  modified_base 23: mod_base = OTHER; note = deoxyribose thymine
  modified_base 23..24: mod_base = OTHER; note = S-phosphorothioate
  modified_base 24: mod_base = OTHER; note = deoxyribose uracil (position 3 connectivity)
  modified_base 24..25: mod_base = OTHER; note = S-phosphorothioate
  modified_base 25: mod_base = OTHER; note = deoxyribose inosine
  modified_base 25..26: mod_base = OTHER; note S-N-(1,3-dimethylimidazolidin-2-ylidene)phosphoramidate
  modified_base 26: mod_base = OTHER; note = 2-O-methoxyethylribose thymine
  modified_base 27: mod_base = OTHER; note = 2-fluororibose cytosine
  modified_base 27..28: mod_base = OTHER; note = S-phosphorothioate
  modified_base 28: mod_base = gm
  modified_base 28..29: mod_base = OTHER; note = S-phosphorothioate
  modified_base 29: mod_base = OTHER; note = 2-O-methylribose adenine
  modified_base 29..30: mod_base = OTHER; note R-N-(1,3-dimethylimidazolidin-2-ylidene)phosphoramidate
  modified_base 30: mod_base = um
  source 1..30: mol_type = other RNA

SEQ ID NO: 793 - RNA, 30 nt, synthetic construct; identical to SEQ ID NO: 273
  misc_feature 1..30: note = Synthetic: WV-46451
  misc_feature 1..30: note = Synthetic: ADR-0104184
  modified_base 1: mod_base = cm
  modified_base 1..2: mod_base = OTHER; note R-N-(1,3-dimethylimidazolidin-2-ylidene)phosphoramidate
  modified_base 2: mod_base = cm
  modified_base 2..3: mod_base = OTHER; note = S-phosphorothioate
  modified_base 3: mod_base = cm
  modified_base 3..4: mod_base = OTHER; note = S-phosphorothioate
  modified_base 4: mod_base = OTHER; note = 2-fluororibose adenine
  modified_base 4..5: mod_base = OTHER; note = S-phosphorothioate
  modified_base 5: mod_base = OTHER; note = 2-fluororibose guanine
  modified_base 5..6: mod_base = OTHER; note = S-phosphorothioate
  modified_base 6: mod_base = cm
  modified_base 7: mod_base = OTHER; note = 2-O-methylribose adenine
  modified_base 7..8: mod_base = OTHER; note = S-phosphorothioate
  modified_base 8: mod_base = OTHER; note = 2-fluororibose guanine
  modified_base 8..9: mod_base = OTHER; note = S-phosphorothioate
  modified_base 9: mod_base = OTHER; note = 2-fluororibose cytosine
  modified_base 10: mod_base = um
  modified_base 10..11: mod_base = OTHER; note = S-phosphorothioate
  modified_base 11: mod_base = OTHER; note = 2-fluororibose uracil
  modified_base 11..12: mod_base = OTHER; note R-N-(1,3-dimethylimidazolidin-2-ylidene)phosphoramidate
  modified_base 12: mod_base = cm
  modified_base 13: mod_base = OTHER; note = 2-fluororibose adenine
  modified_base 13..14: mod_base = OTHER; note = S-phosphorothioate
  modified_base 14: mod_base = OTHER; note = 2-fluororibose guanine
  modified_base 14..15: mod_base = OTHER; note R-N-(1,3-dimethylimidazolidin-2-ylidene)phosphoramidate
  modified_base 15: mod_base = OTHER; note = 2-fluororibose uracil
  modified_base 16: mod_base = cm
  modified_base 16..17: mod_base = OTHER; note = S-phosphorothioate
  modified_base 17: mod_base = OTHER; note = 2-fluororibose cytosine
  modified_base 17..18: mod_base = OTHER; note = S-phosphorothioate
  modified_base 18: mod_base = OTHER; note = 2-fluororibose cytosine
  modified_base 18..19: mod_base = OTHER; note = S-phosphorothioate
  modified_base 19: mod_base = OTHER; note = 2-fluororibose uracil
  modified_base 19..20: mod_base = OTHER; note = S-phosphorothioate
  modified_base 20: mod_base = um
  modified_base 21: mod_base = um
  modified_base 22: mod_base = OTHER; note = 2-fluororibose cytosine
  modified_base 22..23: mod_base = OTHER; note = S-phosphorothioate
  modified_base 23: mod_base = OTHER; note = deoxyribose thymine
  modified_base 23..24: mod_base = OTHER; note = S-phosphorothioate
  modified_base 24: mod_base = OTHER; note = deoxyribose uracil (position 3 connectivity)
  modified_base 24..25: mod_base = OTHER; note = S-phosphorothioate
  modified_base 25: mod_base = OTHER; note = deoxyribose inosine
  modified_base 25..26: mod_base = OTHER; note S-N-(1,3-dimethylimidazolidin-2-ylidene)phosphoramidate
  modified_base 26: mod_base = um
  modified_base 27: mod_base = OTHER; note = 2-O-methoxyethylribose 5-methyl-cytidine
  modified_base 27..28: mod_base = OTHER; note = S-phosphorothioate
  modified_base 28: mod_base = gm
  modified_base 28..29: mod_base = OTHER; note = S-phosphorothioate
  modified_base 29: mod_base = OTHER; note = 2-O-methylribose adenine
  modified_base 29..30: mod_base = OTHER; note R-N-(1,3-dimethylimidazolidin-2-ylidene)phosphoramidate
  modified_base 30: mod_base = um
  source 1..30: mol_type = other RNA

SEQ ID NO: 794 - RNA, 30 nt, synthetic construct; identical to SEQ ID NO: 273
  misc_feature 1..30: note = Synthetic: WV-46458
  misc_feature 1..30: note = Synthetic: ADR-0104117
  modified_base 1: mod_base = cm
  modified_base 1..2: mod_base = OTHER; note R-N-(1,3-dimethylimidazolidin-2-ylidene)phosphoramidate
  modified_base 2: mod_base = cm
  modified_base 2..3: mod_base = OTHER; note = S-phosphorothioate
  modified_base 3: mod_base = cm
  modified_base 3..4: mod_base = OTHER; note = S-phosphorothioate
  modified_base 4: mod_base = OTHER; note = 2-fluororibose adenine
  modified_base 4..5: mod_base = OTHER; note = S-phosphorothioate
  modified_base 5: mod_base = OTHER; note = 2-fluororibose guanine
  modified_base 5..6: mod_base = OTHER; note = S-phosphorothioate
  modified_base 6: mod_base = cm
  modified_base 7: mod_base = OTHER; note = 2-O-methoxyethylribose adenine
  modified_base 8: mod_base = OTHER; note = 2-fluororibose guanine
  modified_base 8..9: mod_base = OTHER; note = S-phosphorothioate
  modified_base 9: mod_base = OTHER; note = 2-fluororibose cytosine
  modified_base 9..10: mod_base = OTHER; note = S-phosphorothioate
  modified_base 10: mod_base = OTHER; note = 2-O-methoxyethylribose thymine
  modified_base 11: mod_base = OTHER; note = 2-fluororibose uracil
  modified_base 11..12: mod_base = OTHER; note R-N-(1,3-dimethylimidazolidin-2-ylidene)phosphoramidate
  modified_base 12: mod_base = cm
  modified_base 13: mod_base = OTHER; note = 2-fluororibose adenine
  modified_base 13..14: mod_base = OTHER; note = S-phosphorothioate
  modified_base 14: mod_base = OTHER; note = 2-fluororibose guanine
  modified_base 14..15: mod_base = OTHER; note R-N-(1,3-dimethylimidazolidin-2-ylidene)phosphoramidate
  modified_base 15: mod_base = OTHER; note = 2-fluororibose uracil
  modified_base 16: mod_base = cm
  modified_base 16..17: mod_base = OTHER; note = S-phosphorothioate
  modified_base 17: mod_base = OTHER; note = 2-fluororibose cytosine
  modified_base 17..18: mod_base = OTHER; note = S-phosphorothioate
  modified_base 18: mod_base = OTHER; note = 2-fluororibose cytosine
  modified_base 18..19: mod_base = OTHER; note = S-phosphorothioate
  modified_base 19: mod_base = OTHER; note = 2-fluororibose uracil
  modified_base 19..20: mod_base = OTHER; note R-N-(1,3-dimethylimidazolidin-2-ylidene)phosphoramidate
  modified_base 20: mod_base = um
  modified_base 21: mod_base = OTHER; note = 2-O-methoxyethylribose thymine
  modified_base 22: mod_base = OTHER; note = 2-fluororibose cytosine
  modified_base 22..23: mod_base = OTHER; note = S-phosphorothioate
  modified_base 23: mod_base = OTHER; note = deoxyribose thymine
  modified_base 23..24: mod_base = OTHER; note = S-phosphorothioate
  modified_base 24: mod_base = OTHER; note = deoxyribose uracil (position 3 connectivity)
  modified_base 24..25: mod_base = OTHER; note = S-phosphorothioate
  modified_base 25: mod_base = OTHER; note = deoxyribose inosine
  modified_base 25..26: mod_base = OTHER; note S-N-(1,3-dimethylimidazolidin-2-ylidene)phosphoramidate
  modified_base 26: mod_base = um
  modified_base 27: mod_base = OTHER; note = 2-fluororibose cytosine
  modified_base 27..28: mod_base = OTHER; note = S-phosphorothioate
  modified_base 28: mod_base = gm
  modified_base 28..29: mod_base = OTHER; note = S-phosphorothioate
  modified_base 29: mod_base = OTHER; note = 2-O-methylribose adenine
  modified_base 29..30: mod_base = OTHER; note R-N-(1,3-dimethylimidazolidin-2-ylidene)phosphoramidate
  modified_base 30: mod_base = um
  source 1..30: mol_type = other RNA

SEQ ID NO: 795 - RNA, 30 nt, synthetic construct; identical to SEQ ID NO: 273
  misc_feature 1..30: note = Synthetic: WV-46459
  misc_feature 1..30: note = Synthetic: ADR-0104103
  modified_base 1: mod_base = cm
  modified_base 1..2: mod_base = OTHER; note R-N-(1,3-dimethylimidazolidin-2-ylidene)phosphoramidate
  modified_base 2: mod_base = cm
  modified_base 2..3: mod_base = OTHER; note = S-phosphorothioate
  modified_base 3: mod_base = cm
  modified_base 3..4: mod_base = OTHER; note = S-phosphorothioate
  modified_base 4: mod_base = OTHER; note = 2-fluororibose adenine
  modified_base 4..5: mod_base = OTHER; note = S-phosphorothioate
  modified_base 5: mod_base = OTHER; note = 2-fluororibose guanine
  modified_base 5..6: mod_base = OTHER; note = S-phosphorothioate
  modified_base 6: mod_base = OTHER; note = 2-O-methoxyethylribose 5-methyl-cytidine
  modified_base 7: mod_base = OTHER; note = 2-O-methylribose adenine
  modified_base 8: mod_base = OTHER; note = 2-fluororibose guanine
  modified_base 8..9: mod_base = OTHER; note = S-phosphorothioate
  modified_base 9: mod_base = OTHER; note = 2-fluororibose cytosine
  modified_base 9..10: mod_base = OTHER; note = S-phosphorothioate
  modified_base 10: mod_base = OTHER; note = 2-O-methoxyethylribose thymine
  modified_base 11: mod_base = OTHER; note = 2-fluororibose uracil
  modified_base 11..12: mod_base = OTHER; note R-N-(1,3-dimethylimidazolidin-2-ylidene)phosphoramidate
  modified_base 12: mod_base = cm
  modified_base 13: mod_base = OTHER; note = 2-fluororibose adenine
  modified_base 13..14: mod_base = OTHER; note = S-phosphorothioate
  modified_base 14: mod_base = OTHER; note = 2-fluororibose guanine
  modified_base 14..15: mod_base = OTHER; note R-N-(1,3-dimethylimidazolidin-2-ylidene)phosphoramidate
  modified_base 15: mod_base = OTHER; note = 2-fluororibose uracil
  modified_base 16: mod_base = cm
  modified_base 16..17: mod_base = OTHER; note = S-phosphorothioate
  modified_base 17: mod_base = OTHER; note = 2-fluororibose cytosine
  modified_base 17..18: mod_base = OTHER; note = S-phosphorothioate
  modified_base 18: mod_base = OTHER; note = 2-fluororibose cytosine
  modified_base 18..19: mod_base = OTHER; note = S-phosphorothioate
  modified_base 19: mod_base = OTHER; note = 2-fluororibose uracil
  modified_base 19..20: mod_base = OTHER; note R-N-(1,3-dimethylimidazolidin-2-ylidene)phosphoramidate
  modified_base 20: mod_base = OTHER; note = 2-O-methoxyethylribose thymine
  modified_base 21: mod_base = OTHER; note = 2-O-methoxyethylribose thymine
  modified_base 22: mod_base = OTHER; note = 2-fluororibose cytosine
  modified_base 22..23: mod_base = OTHER; note = S-phosphorothioate
  modified_base 23: mod_base = OTHER; note = deoxyribose thymine
  modified_base 23..24: mod_base = OTHER; note = S-phosphorothioate
  modified_base 24: mod_base = OTHER; note = deoxyribose uracil (position 3 connectivity)
  modified_base 24..25: mod_base = OTHER; note = S-phosphorothioate
  modified_base 25: mod_base = OTHER; note = deoxyribose inosine
  modified_base 25..26: mod_base = OTHER; note S-N-(1,3-dimethylimidazolidin-2-ylidene)phosphoramidate
  modified_base 26: mod_base = um
  modified_base 27: mod_base = OTHER; note = 2-fluororibose cytosine
  modified_base 27..28: mod_base = OTHER; note = S-phosphorothioate
  modified_base 28: mod_base = gm
  modified_base 28..29: mod_base = OTHER; note = S-phosphorothioate
  modified_base 29: mod_base = OTHER; note = 2-O-methylribose adenine
  modified_base 29..30: mod_base = OTHER; note R-N-(1,3-dimethylimidazolidin-2-ylidene)phosphoramidate
  modified_base 30: mod_base = um
  source 1..30: mol_type = other RNA

SEQ ID NO: 796 - RNA, 30 nt, synthetic construct; identical to SEQ ID NO: 273
  misc_feature 1..30: note = Synthetic: WV-46463
  misc_feature 1..30: note = Synthetic: ADR-0104171
  modified_base 1: mod_base = cm
  modified_base 1..2: mod_base = OTHER; note R-N-(1,3-dimethylimidazolidin-2-ylidene)phosphoramidate
  modified_base 2: mod_base = cm
  modified_base 2..3: mod_base = OTHER; note = S-phosphorothioate
  modified_base 3: mod_base = cm
  modified_base 3..4: mod_base = OTHER; note = S-phosphorothioate
  modified_base 4: mod_base = OTHER; note = 2-fluororibose adenine
  modified_base 4..5: mod_base = OTHER; note = S-phosphorothioate
  modified_base 5: mod_base = OTHER; note = 2-fluororibose guanine
  modified_base 5..6: mod_base = OTHER; note = S-phosphorothioate
  modified_base 6: mod_base = cm
  modified_base 7: mod_base = OTHER; note = 2-O-methylribose adenine
  modified_base 7..8: mod_base = OTHER; note = S-phosphorothioate
  modified_base 8: mod_base = OTHER; note = 2-fluororibose guanine
  modified_base 8..9: mod_base = OTHER; note = S-phosphorothioate
  modified_base 9: mod_base = OTHER; note = 2-fluororibose cytosine
  modified_base 10: mod_base = um
  modified_base 10..11: mod_base = OTHER; note = S-phosphorothioate
  modified_base 11: mod_base = OTHER; note = 2-fluororibose uracil
  modified_base 11..12: mod_base = OTHER; note R-N-(1,3-dimethylimidazolidin-2-ylidene)phosphoramidate
  modified_base 12: mod_base = cm
  modified_base 13: mod_base = OTHER; note = 2-fluororibose adenine
  modified_base 13..14: mod_base = OTHER; note = S-phosphorothioate
  modified_base 14: mod_base = OTHER; note = 2-fluororibose guanine
  modified_base 14..15: mod_base = OTHER; note R-N-(1,3-dimethylimidazolidin-2-ylidene)phosphoramidate
  modified_base 15: mod_base = OTHER; note = 2-fluororibose uracil
  modified_base 16: mod_base = cm
  modified_base 16..17: mod_base = OTHER; note = S-phosphorothioate
  modified_base 17: mod_base = OTHER; note = 2-fluororibose cytosine
  modified_base 17..18: mod_base = OTHER; note = S-phosphorothioate
  modified_base 18: mod_base = OTHER; note = 2-fluororibose cytosine
  modified_base 18..19: mod_base = OTHER; note = S-phosphorothioate
  modified_base 19: mod_base = OTHER; note = 2-fluororibose uracil
  modified_base 19..20: mod_base = OTHER; note = S-phosphorothioate
  modified_base 20: mod_base = um
  modified_base 21: mod_base = um
  modified_base 22: mod_base = OTHER; note = 2-fluororibose cytosine
  modified_base 22..23: mod_base = OTHER; note = S-phosphorothioate
  modified_base 23: mod_base = OTHER; note = deoxyribose thymine
  modified_base 23..24: mod_base = OTHER; note = S-phosphorothioate
  modified_base 24: mod_base = OTHER; note = deoxyribose uracil (position 3 connectivity)
  modified_base 24..25: mod_base = OTHER; note = S-phosphorothioate
  modified_base 25: mod_base = OTHER; note = deoxyribose inosine
  modified_base 25..26: mod_base = OTHER; note S-N-(1,3-dimethylimidazolidin-2-ylidene)phosphoramidate
  modified_base 26: mod_base = OTHER; note = arabinose uracil
  modified_base 27: mod_base = OTHER; note = 2-fluororibose cytosine
  modified_base 27..28: mod_base = OTHER; note = S-phosphorothioate
  modified_base 28: mod_base = gm
  modified_base 28..29: mod_base = OTHER; note = S-phosphorothioate
  modified_base 29: mod_base = OTHER; note = 2-O-methylribose adenine
  modified_base 29..30: mod_base = OTHER; note R-N-(1,3-dimethylimidazolidin-2-ylidene)phosphoramidate
  modified_base 30: mod_base = um
  source 1..30: mol_type = other RNA

SEQ ID NO: 797 - RNA, 30 nt, synthetic construct; identical to SEQ ID NO: 273
  misc_feature 1..30: note = Synthetic: WV-46464
  misc_feature 1..30: note = Synthetic: ADR-0104185
  modified_base 1: mod_base = cm
  modified_base 1..2: mod_base = OTHER; note R-N-(1,3-dimethylimidazolidin-2-ylidene)phosphoramidate
  modified_base 2: mod_base = cm
  modified_base 2..3: mod_base = OTHER; note = S-phosphorothioate
  modified_base 3: mod_base = cm
  modified_base 3..4: mod_base = OTHER; note = S-phosphorothioate
  modified_base 4: mod_base = OTHER; note = 2-fluororibose adenine
  modified_base 4..5: mod_base = OTHER; note = S-phosphorothioate
  modified_base 5: mod_base = OTHER; note = 2-fluororibose guanine
  modified_base 5..6: mod_base = OTHER; note = S-phosphorothioate
  modified_base 6: mod_base = cm
  modified_base 7: mod_base = OTHER; note = 2-O-methylribose adenine
  modified_base 7..8: mod_base = OTHER; note = S-phosphorothioate
  modified_base 8: mod_base = OTHER; note = 2-fluororibose guanine
  modified_base 8..9: mod_base = OTHER; note = S-phosphorothioate
  modified_base 9: mod_base = OTHER; note = 2-fluororibose cytosine
  modified_base 10: mod_base = um
  modified_base 10..11: mod_base = OTHER; note = S-phosphorothioate
  modified_base 11: mod_base = OTHER; note = 2-fluororibose uracil
  modified_base 11..12: mod_base = OTHER; note R-N-(1,3-dimethylimidazolidin-2-ylidene)phosphoramidate
  modified_base 12: mod_base = cm
  modified_base 13: mod_base = OTHER; note = 2-fluororibose adenine
  modified_base 13..14: mod_base = OTHER; note = S-phosphorothioate
  modified_base 14: mod_base = OTHER; note = 2-fluororibose guanine
  modified_base 14..15: mod_base = OTHER; note R-N-(1,3-dimethylimidazolidin-2-ylidene)phosphoramidate
  modified_base 15: mod_base = OTHER; note = 2-fluororibose uracil
  modified_base 16: mod_base = cm
  modified_base 16..17: mod_base = OTHER; note = S-phosphorothioate
  modified_base 17: mod_base = OTHER; note = 2-fluororibose cytosine
  modified_base 17..18: mod_base = OTHER; note = S-phosphorothioate
  modified_base 18: mod_base = OTHER; note = 2-fluororibose cytosine
  modified_base 18..19: mod_base = OTHER; note = S-phosphorothioate
  modified_base 19: mod_base = OTHER; note = 2-fluororibose uracil
  modified_base 19..20: mod_base = OTHER; note = S-phosphorothioate
  modified_base 20: mod_base = um
  modified_base 21: mod_base = um
  modified_base 22: mod_base = OTHER; note = 2-fluororibose cytosine
  modified_base 22..23: mod_base = OTHER; note = S-phosphorothioate
  modified_base 23: mod_base = OTHER; note = deoxyribose thymine
  modified_base 23..24: mod_base = OTHER; note = S-phosphorothioate
  modified_base 24: mod_base = OTHER; note = deoxyribose uracil (position 3 connectivity)
  modified_base 24..25: mod_base = OTHER; note = S-phosphorothioate
  modified_base 25: mod_base = OTHER; note = deoxyribose inosine
  modified_base 25..26: mod_base = OTHER; note S-N-(1,3-dimethylimidazolidin-2-ylidene)phosphoramidate
  modified_base 27: mod_base = OTHER; note = 2-fluororibose cytosine
  modified_base 27..28: mod_base = OTHER; note = S-phosphorothioate
  modified_base 28: mod_base = gm
  modified_base 28..29: mod_base = OTHER; note = S-phosphorothioate
  modified_base 29: mod_base = OTHER; note = 2-O-methylribose adenine
  modified_base 29..30: mod_base = OTHER; note R-N-(1,3-dimethylimidazolidin-2-ylidene)phosphoramidate
  modified_base 30: mod_base = um
  source 1..30: mol_type = other RNA

SEQ ID NO: 798 - RNA, 30 nt, synthetic construct; identical to SEQ ID NO: 273
  misc_feature 1..30: note = Synthetic: WV-46465
  misc_feature 1..30: note = Synthetic: ADR-0104265
  modified_base 1: mod_base = cm
  modified_base 1..2: mod_base = OTHER; note R-N-(1,3-dimethylimidazolidin-2-ylidene)phosphoramidate
  modified_base 2: mod_base = cm
  modified_base 2..3: mod_base = OTHER; note = S-phosphorothioate
  modified_base 3: mod_base = cm
  modified_base 3..4: mod_base = OTHER; note = S-phosphorothioate
  modified_base 4: mod_base = OTHER; note = 2-fluororibose adenine
  modified_base 4..5: mod_base = OTHER; note = S-phosphorothioate
  modified_base 5: mod_base = OTHER; note = 2-fluororibose guanine
  modified_base 5..6: mod_base = OTHER; note = S-phosphorothioate
  modified_base 6: mod_base = cm
  modified_base 7: mod_base = OTHER; note = 2-O-methylribose adenine
  modified_base 8: mod_base = OTHER; note = 2-fluororibose guanine
  modified_base 8..9: mod_base = OTHER; note = S-phosphorothioate
  modified_base 9: mod_base = OTHER; note = 2-fluororibose cytosine
  modified_base 9..10: mod_base = OTHER; note = S-phosphorothioate
  modified_base 10: mod_base = um
  modified_base 11: mod_base = OTHER; note = 2-fluororibose uracil
  modified_base 11..12: mod_base = OTHER; note R-N-(1,3-dimethylimidazolidin-2-ylidene)phosphoramidate
  modified_base 12: mod_base = cm
  modified_base 13: mod_base = OTHER; note = 2-fluororibose adenine
  modified_base 13..14: mod_base = OTHER; note = S-phosphorothioate
  modified_base 14: mod_base = OTHER; note = 2-fluororibose guanine
  modified_base 14..15: mod_base = OTHER; note R-N-(1,3-dimethylimidazolidin-2-ylidene)phosphoramidate
  modified_base 15: mod_base = OTHER; note = 2-fluororibose uracil
  modified_base 16: mod_base = cm
  modified_base 16..17: mod_base = OTHER; note = S-phosphorothioate
  modified_base 17: mod_base = OTHER; note = 2-fluororibose cytosine
  modified_base 17..18: mod_base = OTHER; note = S-phosphorothioate
  modified_base 18: mod_base = OTHER; note = 2-fluororibose cytosine
  modified_base 18..19: mod_base = OTHER; note = S-phosphorothioate
  modified_base 19: mod_base = OTHER; note = 2-fluororibose uracil
  modified_base 19..20: mod_base = OTHER; note R-N-(1,3-dimethylimidazolidin-2-ylidene)phosphoramidate
  modified_base 20: mod_base = um
  modified_base 21: mod_base = um
  modified_base 22: mod_base = OTHER; note = 2-fluororibose cytosine
  modified_base 22..23: mod_base = OTHER; note = S-phosphorothioate
  modified_base 23: mod_base = OTHER; note = deoxyribose thymine
  modified_base 23..24: mod_base = OTHER; note = S-phosphorothioate
  modified_base 24: mod_base = OTHER; note = deoxyribose uracil (position 3 connectivity)
  modified_base 24..25: mod_base = OTHER; note = S-phosphorothioate
  modified_base 25: mod_base = OTHER; note = deoxyribose inosine
  modified_base 25..26: mod_base = OTHER; note S-N-(1,3-dimethylimidazolidin-2-ylidene)phosphoramidate
  modified_base 26: mod_base = OTHER; note = arabinose uracil
  modified_base 27: mod_base = OTHER; note = 2-fluororibose cytosine
  modified_base 27..28: mod_base = OTHER; note = S-phosphorothioate
  modified_base 28: mod_base = gm
  modified_base 28..29: mod_base = OTHER; note = S-phosphorothioate
  modified_base 29: mod_base = OTHER; note = 2-O-methylribose adenine
  modified_base 29..30: mod_base = OTHER; note R-N-(1,3-dimethylimidazolidin-2-ylidene)phosphoramidate
  modified_base 30: mod_base = um
  source 1..30: mol_type = other RNA

SEQ ID NO: 799 - RNA, 30 nt, synthetic construct; identical to SEQ ID NO: 273
  misc_feature 1..30: note = Synthetic: WV-46466
  misc_feature 1..30: note = Synthetic: ADR-0104267
  modified_base 1: mod_base = cm
  modified_base 1..2: mod_base = OTHER; note R-N-(1,3-dimethylimidazolidin-2-ylidene)phosphoramidate
  modified_base 2: mod_base = cm
  modified_base 2..3: mod_base = OTHER; note = S-phosphorothioate
  modified_base 3: mod_base = cm
  modified_base 3..4: mod_base = OTHER; note = S-phosphorothioate
  modified_base 4: mod_base = OTHER; note = 2-fluororibose adenine
  modified_base 4..5: mod_base = OTHER; note = S-phosphorothioate
  modified_base 5: mod_base = OTHER; note = 2-fluororibose guanine
  modified_base 5..6: mod_base = OTHER; note = S-phosphorothioate
  modified_base 6: mod_base = cm
  modified_base 7: mod_base = OTHER; note = 2-O-methylribose adenine
  modified_base 8: mod_base = OTHER; note = 2-fluororibose guanine
  modified_base 8..9: mod_base = OTHER; note = S-phosphorothioate
  modified_base 9: mod_base = OTHER; note = 2-fluororibose cytosine
  modified_base 9..10: mod_base = OTHER; note = S-phosphorothioate
  modified_base 10: mod_base = um
  modified_base 11: mod_base = OTHER; note = 2-fluororibose uracil
  modified_base 11..12: mod_base = OTHER; note R-N-(1,3-dimethylimidazolidin-2-ylidene)phosphoramidate
  modified_base 12: mod_base = cm
  modified_base 13: mod_base = OTHER; note = 2-fluororibose adenine
  modified_base 13..14: mod_base = OTHER; note = S-phosphorothioate
  modified_base 14: mod_base = OTHER; note = 2-fluororibose guanine
  modified_base 14..15: mod_base = OTHER; note R-N-(1,3-dimethylimidazolidin-2-ylidene)phosphoramidate
  modified_base 15: mod_base = OTHER; note = 2-fluororibose uracil
  modified_base 16: mod_base = cm
  modified_base 16..17: mod_base = OTHER; note = S-phosphorothioate
  modified_base 17: mod_base = OTHER; note = 2-fluororibose cytosine
  modified_base 17..18: mod_base = OTHER; note = S-phosphorothioate
  modified_base 18: mod_base = OTHER; note = 2-fluororibose cytosine
  modified_base 18..19: mod_base = OTHER; note = S-phosphorothioate
  modified_base 19: mod_base = OTHER; note = 2-fluororibose uracil
  modified_base 19..20: mod_base = OTHER; note R-N-(1,3-dimethylimidazolidin-2-ylidene)phosphoramidate
  modified_base 20: mod_base = um
  modified_base 21: mod_base = um
  modified_base 22: mod_base = OTHER; note = 2-fluororibose cytosine
  modified_base 22..23: mod_base = OTHER; note = S-phosphorothioate
  modified_base 23: mod_base = OTHER; note = deoxyribose thymine
  modified_base 23..24: mod_base = OTHER; note = S-phosphorothioate
  modified_base 24: mod_base = OTHER; note = deoxyribose uracil (position 3 connectivity)
  modified_base 24..25: mod_base = OTHER; note = S-phosphorothioate
  modified_base 25: mod_base = OTHER; note = deoxyribose inosine
  modified_base 25..26: mod_base = OTHER; note S-N-(1,3-dimethylimidazolidin-2-ylidene)phosphoramidate
  modified_base 27: mod_base = OTHER; note = 2-fluororibose cytosine
  modified_base 27..28: mod_base = OTHER; note = S-phosphorothioate
  modified_base 28: mod_base = gm
  modified_base 28..29: mod_base = OTHER; note = S-phosphorothioate
  modified_base 29: mod_base = OTHER; note = 2-O-methylribose adenine
  modified_base 29..30: mod_base = OTHER; note R-N-(1,3-dimethylimidazolidin-2-ylidene)phosphoramidate
  modified_base 30: mod_base = um
  source 1..30: mol_type = other RNA

SEQ ID NO: 800 - RNA, 12 nt, synthetic construct
  misc_feature 1..12: note = Synthetic: WV-48444
  misc_feature 1..12: note = Synthetic: ADR-0104342
  modified_base 1: mod_base = gm
  modified_base 1..2: mod_base = OTHER; note = phosphorothioate
  modified_base 2: mod_base = OTHER; note = 2-O-methylribose adenine
  modified_base 3: mod_base = OTHER; note = 2-fluororibose adenine
  modified_base 4: mod_base = OTHER; note = 2-fluororibose guanine
  modified_base 5: mod_base = OTHER; note = 2-fluororibose cytosine
  modified_base 6: mod_base = OTHER; note = 2-fluororibose uracil
  modified_base 7: mod_base = OTHER; note = 2-fluororibose guanine
  modified_base 8: mod_base = OTHER; note = 2-fluororibose cytosine
  modified_base 9: mod_base = OTHER; note = 2-fluororibose uracil
  modified_base 10: mod_base = OTHER; note = 2-fluororibose guanine
  modified_base 11: mod_base = gm
  modified_base 11..12: mod_base = OTHER; note = phosphorothioate
  modified_base 12: mod_base = gm
  source 1..12: mol_type = other RNA
gaagctgctggg

SEQ ID NO: 801 - RNA, 12 nt, synthetic construct
  misc_feature 1..12: note = Synthetic: WV-48445
  misc_feature 1..12: note = Synthetic: ADR-0104344
  modified_base 1: mod_base = gm
  modified_base 1..2: mod_base = OTHER; note = phosphorothioate
  modified_base 2: mod_base = OTHER; note = 2-O-methylribose adenine
  modified_base 3: mod_base = OTHER; note = 2-O-methylribose adenine
  modified_base 4: mod_base = gm
  modified_base 5: mod_base = cm
  modified_base 6: mod_base = um
  modified_base 7: mod_base = gm
  modified_base 8: mod_base = cm
  modified_base 9: mod_base = um
  modified_base 10: mod_base = gm
  modified_base 11: mod_base = gm
  modified_base 11..12: mod_base = OTHER; note = phosphorothioate
  modified_base 12: mod_base = gm
  source 1..12: mol_type = other RNA
gaagctgctggg

SEQ ID NO: 802 - RNA, 12 nt, synthetic construct
  misc_feature 1..12: note = Synthetic: WV-48446
  misc_feature 1..12: note = Synthetic: ADR-0104346
  modified_base 1: mod_base = gm
  modified_base 1..2: mod_base = OTHER; note = phosphorothioate
  modified_base 2: mod_base = OTHER; note = 2-O-methylribose adenine
  modified_base 11: mod_base = gm
  modified_base 11..12: mod_base = OTHER; note = phosphorothioate
  modified_base 12: mod_base = gm
  source 1..12: mol_type = other RNA
gaagctgctggg

SEQ ID NO: 803 - RNA, 14 nt, synthetic construct
  misc_feature 1..14: note = Synthetic: WV-48447
  misc_feature 1..14: note = Synthetic: ADR-0104332
  modified_base 1: mod_base = cm
  modified_base 1..2: mod_base = OTHER; note = phosphorothioate
  modified_base 2: mod_base = um
  modified_base 3: mod_base = OTHER; note = 2-fluororibose guanine
  modified_base 4: mod_base = OTHER; note = 2-fluororibose adenine
  modified_base 5: mod_base = OTHER; note = 2-fluororibose adenine
  modified_base 6: mod_base = OTHER; note = 2-fluororibose guanine
  modified_base 7: mod_base = OTHER; note = 2-fluororibose cytosine
  modified_base 8: mod_base = OTHER; note = 2-fluororibose uracil
  modified_base 9: mod_base = OTHER; note = 2-fluororibose guanine
  modified_base 10: mod_base = OTHER; note = 2-fluororibose cytosine
  modified_base 11: mod_base = OTHER; note = 2-fluororibose uracil
  modified_base 12: mod_base = OTHER; note = 2-fluororibose guanine
  modified_base 13: mod_base = gm
  modified_base 13..14: mod_base = OTHER; note = phosphorothioate
  modified_base 14: mod_base = gm
  source 1..14: mol_type = other RNA
ctgaagctgctggg

SEQ ID NO: 804 - RNA, 14 nt, synthetic construct
  misc_feature 1..14: note = Synthetic: WV-48448
  misc_feature 1..14: note = Synthetic: ADR-0104333
  modified_base 1: mod_base = cm
  modified_base 1..2: mod_base = OTHER; note = phosphorothioate
  modified_base 2: mod_base = um
  modified_base 3: mod_base = gm
  modified_base 4: mod_base = OTHER; note = 2-O-methylribose adenine
  modified_base 5: mod_base = OTHER; note = 2-O-methylribose adenine
  modified_base 6: mod_base = gm
  modified_base 7: mod_base = cm
  modified_base 8: mod_base = um
  modified_base 9: mod_base = gm
  modified_base 10: mod_base = cm
  modified_base 11: mod_base = um
  modified_base 12: mod_base = gm
  modified_base 13: mod_base = gm
  modified_base 13..14: mod_base = OTHER; note = phosphorothioate
  modified_base 14: mod_base = gm
  source 1..14: mol_type = other RNA
ctgaagctgctggg

SEQ ID NO: 805 - RNA, 14 nt, synthetic construct
  misc_feature 1..14: note = Synthetic: WV-48449
  misc_feature 1..14: note = Synthetic: ADR-0104334
  modified_base 1: mod_base = cm
  modified_base 1..2: mod_base = OTHER; note = phosphorothioate
  modified_base 2: mod_base = um
  modified_base 13: mod_base = gm
  modified_base 13..14: mod_base = OTHER; note = phosphorothioate
  modified_base 14: mod_base = gm
  source 1..14: mol_type = other RNA
ctgaagctgctggg

SEQ ID NO: 806 - RNA, 16 nt, synthetic construct
  misc_feature 1..16: note = Synthetic: WV-48450
  misc_feature 1..16: note = Synthetic: ADR-0104343
  modified_base 1: mod_base = gm
  modified_base 1..2: mod_base = OTHER; note = phosphorothioate
  modified_base 2: mod_base = OTHER; note = 2-O-methylribose adenine
  modified_base 3: mod_base = OTHER; note = 2-fluororibose cytosine
  modified_base 4: mod_base = OTHER; note = 2-fluororibose uracil
  modified_base 5: mod_base = OTHER; note = 2-fluororibose guanine
  modified_base 6: mod_base = OTHER; note = 2-fluororibose adenine
  modified_base 7: mod_base = OTHER; note = 2-fluororibose adenine
  modified_base 8: mod_base = OTHER; note = 2-fluororibose guanine
  modified_base 9: mod_base = OTHER; note = 2-fluororibose cytosine
  modified_base 10: mod_base = OTHER; note = 2-fluororibose uracil
  modified_base 11: mod_base = OTHER; note = 2-fluororibose guanine
  modified_base 12: mod_base = OTHER; note = 2-fluororibose cytosine
  modified_base 13: mod_base = OTHER; note = 2-fluororibose uracil
  modified_base 14: mod_base = OTHER; note = 2-fluororibose guanine
  modified_base 15: mod_base = gm
  modified_base 15..16: mod_base = OTHER; note = phosphorothioate
  modified_base 16: mod_base = gm
  source 1..16: mol_type = other RNA
gactgaagctgctggg

SEQ ID NO: 807 - RNA, 16 nt, synthetic construct
  misc_feature 1..16: note = Synthetic: WV-48451
  misc_feature 1..16: note = Synthetic: ADR-0104345
  modified_base 1: mod_base = gm
  modified_base 1..2: mod_base = OTHER; note = phosphorothioate
  modified_base 2: mod_base = OTHER; note = 2-O-methylribose adenine
  modified_base 3: mod_base = cm
  modified_base 4: mod_base = um
  modified_base 5: mod_base = gm
  modified_base 6: mod_base = OTHER; note = 2-O-methylribose adenine
  modified_base 7: mod_base = OTHER; note = 2-O-methylribose adenine
  modified_base 8: mod_base = gm
  modified_base 9: mod_base = cm
  modified_base 10: mod_base = um
  modified_base 11: mod_base = gm
  modified_base 12: mod_base = cm
  modified_base 13: mod_base = um
  modified_base 14: mod_base = gm
  modified_base 15: mod_base = gm
  modified_base 15..16: mod_base = OTHER; note = phosphorothioate
  modified_base 16: mod_base = gm
  source 1..16: mol_type = other RNA
gactgaagctgctggg

SEQ ID NO: 808 - RNA, 16 nt, synthetic construct
  misc_feature 1..16: note = Synthetic: WV-48452
  misc_feature 1..16: note = Synthetic: ADR-0104347
  modified_base 1: mod_base = gm
  modified_base 1..2: mod_base = OTHER; note = phosphorothioate
  modified_base 2: mod_base = OTHER; note = 2-O-methylribose adenine
  modified_base 15: mod_base = gm
  modified_base 15..16: mod_base = OTHER; note = phosphorothioate
  modified_base 16: mod_base = gm
  source 1..16: mol_type = other RNA
gactgaagctgctggg
